(19) United States
(12) Patent Application Publication
(10) Pub. No.: US 2024/0423210 A1
(43) Pub. Date: Dec. 26, 2024

(54) PREDATORY MITES WITH IMPROVED TRAITS

(71) Applicant: BIO-BEE SDE ELIYAHU LTD., Emmek, Hama’yanot (IL)

(72) Inventors: Arnon TABIC, Bet Keshet (IL); Reut BEN AMI, Kibbutz Neve Ur (IL); Shimon STEINBERG, Timrat (IL)

(73) Assignee: BIO-BEE SDE ELIYAHU LTD., Emmek, Hama’yanot (IL)

(21) Appl. No.: 18/689,937

(22) PCT Filed: Sep. 7, 2022
(86) PCT No.: PCT/IL2022/050974

§ 371 Date: Mar. 7, 2024

Related U.S. Application Data
(60) Provisional application No. 63/260,955, filed on Sep. 7, 2021.

(51) Int. Cl. A01N 63/16; A01K 67/033; A01P 7/02; C12Q 1/6888

(52) U.S. Cl. CPC A01N 63/16; A01K 67/033; A01P 7/02; C12Q 1/6888; A01K 2227/70; C12Q 2600/156

(57) ABSTRACT

The present invention discloses a biological control composition comprising a cultivated rearing population of Phytoseiulus persimilis (P. persimilis) predatory mite individuals, and optionally a carrier material, wherein at least 5% of the P. persimilis individuals comprise within their genome at least one Single Nucleotide Polymorphism (SNP) marker associated with the trait of improved rearing properties on a non-Tetranychid arthropod prey as a factious host, preferably on an immobilized non-Tetranychid arthropod prey, such as on an Astigmatid prey, most preferably on an immobilized Astigmatid prey, as compared to a P. persimilis population characterized by less than 5% individuals comprising within their genome said at least one SNP marker.

### FIELD OF THE INVENTION

[0001] The present invention relates to the field of biological control agents for crop protection, and more particularly to novel means and methods for rearing biological control agents against plant pests.

### BACKGROUND OF THE INVENTION

[0002] The use of arthropods (insects and mites) as Biological Control Agents (BCA) is an expanding field with many advantages over chemical pest control. Arthropod BCA's are able to naturally control other arthropod species that act as pests on the crop.

[0003] Phytoseiulus is a genus of predatory mites in the family Phytoseiidae. Mite species of this genus are the most frequently used BCA to control two-spotted spider mites in greenhouses and outdoor crops grown in mild environments. A Phytoseiulus mite can consume up to seven adult spider mites or several dozens of their eggs in a day. A well-fed female lays about 50 eggs in her lifetime. The genus Phytoseiulus contains five known species, namely: P. persimilis, P. longipes, P. macropilis, P. fragariae and P. robertsi. All species of the genus Phytoseiulus are considered Type I Specialized Predators of Tetranychus Species, i.e. highly specific to a diet consisting of spider mites, preferably of the genus Tetranychus (McMurtry and Croft 1997). This is further strengthened by the publication of McMurtry et al. (2013), supporting that Phytoseiulus species (Type Ta predators) only feed and reproduce on their natural prey. This publication recites “Subtype I-a—Specialized predators of Tetranychus (Tetranychidae)”. This category is considered to be genus-specific with regard to prey preference and is represented only by Phytoseiulus species. The most frequently used species of this genus for biological control of spider mites is Phytoseiulus persimilis.

[0004] Phytoseiulus persimilis Athias-Henriot (Acari: Phytoseiidae) is a specialist predator on Tetranychid mites, especially on the two-spotted spider mite, Tetranychus urticae Koch (Acari: Tetranychidae).

[0005] From a commercial point of view, a significant disadvantage of mass producing a predatory mite that exclusively feeds on phytophagous mites, such as spider mites, is that it requires rearing prey mites on plants, which involves high rearing costs and complex operations (such as providing appropriate plants in sufficient abundance, under greenhouse conditions).

[0006] WO2019171374 and WO2021044404 publications report for the first time successful rearing of Phytoseiulus mite species on a non-Tetranychid arthropod prey.

[0007] However, although predatory mites (Acari: Phytoseiidae) are the most important beneficial arthropods used in biological pest control of protected crops around the world, the genomes of mites are far less understood than, for example, those of insects.

[0008] In view of the above, there is a long felt and unmet need for generation of predatory Phytoseiidae mites with improved genetic traits.

### SUMMARY OF THE INVENTION

[0009] The present invention relates to the field of insect control and more specifically to a system and method for rearing biological control agents against plant pests.

[0010] It is one object of the present invention to disclose a biological control composition comprising a cultivated rearing population of Phytoseiulus persimilis (P. persimilis) predatory mite individuals, and optionally a carrier material, wherein at least 5% of said P. persimilis individuals comprise within their genome at least one Single Nucleotide Polymorphism (SNP) marker selected from: (a) SNP at position 34739 of SEQ ID NO:84 or a variant, portion or complementary sequence thereof, (b) at least one SNP at a position selected from 105452, 109775, 115020, 115073, 125940, 131548 and 131555, of SEQ ID NO:85 or a variant, portion or complementary sequence thereof, (c) at least one SNP at a position selected from 99333, 99595, 99605, 115325 and 115354, of SEQ ID NO:86 or a variant, portion or complementary sequence thereof, (d) at least one SNP at a position selected from 4508, 11697, 12229, 13135, 32979, 38081, 38220, of SEQ ID NO:87 or a variant, portion or complementary sequence thereof, (e) at least one SNP at a position selected from 30913, 34950, 38409, 38458, 42427, 42604 and 43158 of SEQ ID NO:88 or a variant, portion or complementary sequence thereof, (f) SNP at position 1032 of SEQ ID NO:89 or a variant, portion or complementary sequence thereof, (g) SNP at position 173977 and/or SNP at position 228195 of SEQ ID NO:90 or a variant, portion or complementary sequence thereof, and (h) at least one SNP at a position selected from 857, 15689, 40135 and 49492 of SEQ ID NO:91 or a variant, portion or complementary sequence thereof.

[0011] It is a further object of the present invention to disclose the biological control composition as defined above, wherein the at least one SNP is selected from: (a) SNP of G at position 34739 of SEQ ID NO:84 or a variant, portion or complementary sequence thereof, (b) at least one SNP selected from C at position 105452, G at position 109775, A at position 115020, T at position 115073, C at position 125940, G at position 131548, G at position 131555, of SEQ ID NO:85 or a variant, portion or complementary sequence thereof, (c) at least one SNP selected from A at position 99333, G at position 99595, T at position 99605, A at position 115325, C at position 115354, of SEQ ID NO:86 or a variant, portion or complementary sequence thereof, (d) at least one SNP selected from A at position 4508, A at position 11697, C at position 12229, A at position 13135, C at position 32979, G at position 38081, C at position 38220 of SEQ ID NO:87 or a variant, portion or complementary sequence thereof, (e) at least one SNP selected from A at position 30913, C at position 34950, C at position 38409, A at position 38458, T at position 42427, G at position 42604, T at position 43158 of SEQ ID NO:88 or a variant, portion or complementary sequence thereof, (f) SNP of G at position 1032 of SEQ ID NO:89 or a variant, portion or complementary sequence thereof, (g) SNP of A at position 173977 and/or SNP of T at position 228195 of SEQ ID NO:90 or a variant, portion or complementary sequence thereof, and (h) at least one SNP selected from C at position 857, T at position 15689, C at position 40135, G at position 49492 of SEQ ID NO:91 or a variant, portion or complementary sequence thereof.

[0012] It is a further object of the present invention to disclose the biological control composition as defined in any above, wherein said variant comprises at least 90% sequence similarity to the corresponding SEQ ID nucleotide sequence.

[0013] It is a further object of the present invention to disclose the biological control composition as defined in any of the above, wherein at least 5.5%, such as at least 10%, 20%, 30%, 40%, 50%, 60%, 70%, 80%, at least 90% or 100% of said P. persimilis predatory individuals of said cultivated population comprise said at least one SNP marker.

[0014] It is a further object of the present invention to disclose the biological control composition as defined in any of the above, wherein the at least 5% of said P. persimilis predatory individuals comprise within their genome a polynucleotide genomic sequence selected from SEQ ID NO:1-28 and SEQ ID NO:84-91, and any combination thereof.

[0015] It is a further object of the present invention to disclose the biological control composition as defined in any of the above, wherein the at least 5% of said P. persimilis predatory individuals comprise within their genome a polynucleotide genomic sequence selected from SEQ ID NO:1 to SEQ ID NO:91, and any combination thereof.

[0016] It is a further object of the present invention to disclose the biological control composition as defined in any of the above, wherein the cultivated rearing population of P. persimilis predatory mite individuals is characterized by improved rearing properties on a non-Tetranychid arthropod prey as a factious host, preferably on an immobilized non-Tetranychid arthropod prey, such as on an Astigmatid prey, most preferably on an immobilized Astigmatid prey, as compared to a P. persimilis population characterized by less than 5% individuals comprising within their genome said at least one SNP marker.

[0017] It is a further object of the present invention to disclose the biological control composition as defined in any of the above, wherein the cultivated rearing population of P. persimilis predatory mite individuals is characterized by a daily reproduction rate (λ) of above 1.06, preferably in the range of 1.10-1.40, such as 1.15-1.40, 1.20-1.40, 1.25-1.40, 1.30-1.40, or 1.10-1.35, 1.10-1.30, 1.10-1.25, 1.10-1.20, while preying on a non-Tetranychid arthropod as a food source, preferably on an immobilized non-Tetranychid arthropod prey, such as on an Astigmatid prey, most preferably on an immobilized Astigmatid prey.

[0018] It is a further object of the present invention to disclose the biological control composition as defined in any of the above, wherein the composition further comprises as a food source for the P. persimilis predatory mites of the cultivated rearing population, a non-Tetranychid arthropod prey, preferably an immobilized non-Tetranychid arthropod prey, such as on an Astigmatid prey, most preferably on an immobilized Astigmatid prey.

[0019] It is a further object of the present invention to disclose the biological control composition as defined in any of the above, wherein the non-Tertranychid arthropod prey is selected from an Astigmatid mite species, an Artemia species, species from the Phytoseiidae family, Thrips such as Frankliniella occidentalis, Tarsonemidae mite species, and lepidopteran eggs such as of Ephestia kunhiela.

[0020] It is a further object of the present invention to disclose the biological control composition as defined in any of the above, wherein said Astigmata prey species is selected from members of the family Acaridae, Carpoglyphidae, Glycyphagidae, and/or from the family Chortoglyphagidae.

[0021] It is a further object of the present invention to disclose the biological control composition as defined in any of the above, wherein the at least one species from the order Astigmata is selected from members of a genus such as Acarus, Tyrophagus, Aleuroglyphus, Lardoglyphus, Caloglyphus, Suidasia, Thyreophagus, Carpoglyphus, Glycyphagus, Lepidoglyphus, Blomia, and/or Chortoglyphus.

[0022] It is a further object of the present invention to disclose the biological control composition as defined in any of the above, wherein the at least one species from the order Astigmata is selected from: Acarus siro, Acarus farris, Acarus immobilis, Acarus chaetoxysilos, Tyrophagus longior, Tyrophagus similis, Tyrophagus putrescentiae, Tyrophagus communis, Aleuroglyphus ovatus, Lardoglyphus konoi, Caloglyphus mycophagus, Suidasia nesbitti, Thyreophagus entomophagus, Carpoglyphus lactis, Carpoglyphus munroi, Glycyphagus domesticus, Lepidoglyphus destructor, Blomia freeman, Blomia tropicalis and/or Chortoglyphus arcuatus.

[0023] It is a further object of the present invention to disclose the biological control composition as defined in any of the above, wherein said Astigmatid mite species is selected from:
[0024] i) Carpoglyphidae such as from the genus Carpoglyphus e.g. Carpoglyphus lactis;
[0025] ii) Pyroglyphidae such as from the genus Dermatophagoides e.g. Dermatophagoides pteronysinus, Dermatophagoides farinae; from the genus Euroglyphus e.g. Euroglyphus longior, Euroglyphus maynei; from the genus Pyroglyphus e.g. Pyroglyphus africanus;
[0026] iii) Glycyphagidae such as from the subfamily Ctenoglyphinae, such as from the genus Diamesoglyphus e.g. Diamesoglyphus intermedius, or from the genus Ctenoglyphus, e.g. Ctenoglyphus plumiger, Ctenoglyphus canestrinii, Ctenoglyphus palmifer; the subfamily Glycyphaginae, such as from the genus Blomia, e.g. Blomia freemani or from the genus Glycyphagus, e.g. Glycyphagus ornatus, Glycyphagus bicaudatus, Glycyphagus privatus, Glycyphagus domesticus, or from the genus Lepidoglyphus e.g. Lepidoglyphus michaeli, Lepidoglyphus fustifer, Lepidoglyphus destructor, or from the genus Austroglycyphagus, e.g. Austroglycyphagus geniculatus; from the subfamily Airoglyphinae, such as from the genus Airoglyphus, e.g. Airoglyphus robustus; from the subfamily Labidophorinae, such as from the genus Gohieria, e.g. Gohieria. fusca; or from the subfamily Nycteriglyphinae such as from the genus Coproglyphus, e.g. Coproglyphus stammeri or from the subfamily Chortoglyphidae, such as the genus Chortoglyphus e.g. Chortoglyphus arcuatus;
[0027] iv) Acaridae such as from the genus Tyrophagus e.g. Tyrophagus putrescentiae, Tyrophagus tropicus, Tyrophagus communis from the genus Acarus e.g. Acarus siro, Acarus farris, Acarus gracilis; from the genus Lardoglyphus e.g. Lardoglyphus konoi, from the genus Thyreophagus, such as Thyreophagus entomophagus; from the genus Aleuroglyphus, e.g. Aleuroglyphus ovatus;
[0028] v) Suidasiidae such as from the genus Suidasia, such as Suidasia nesbiti, Suidasia pontifica or Suidasia medanensis.

[0029] It is a further object of the present invention to disclose the biological control composition as defined in any of the above, wherein the non-Tetranychid arthropod prey comprises immobilized life stages comprising immobilized eggs.

[0030] It is a further object of the present invention to disclose the biological control composition as defined in any of the above, wherein said immobilization is carried out by a treatment selected from: thermal treatment, such as freezing, freeze-drying, heating, cold-shock or heat-shock treatment; chemical treatment, such as gas or fume treatment; radiation treatment, such as UV, microwave, gamma irradiation or X-ray treatment; mechanical treatment, such as vigorous shaking, or stirring, subjecting to shear forces, collision; gas pressure treatment, such as ultrasound treatment, pressure changes, pressure drops; electrical treatment, such as electrocution; immobilizing with an adhesive; immobilization by starvation, such as induced by water or food deprivation; immobilization by suffocation or anoxia treatment, such as by temporarily eliminating oxygen from the atmosphere or replacing oxygen by another gas and any combination thereof.

[0031] It is a further object of the present invention to disclose the biological control composition as defined in any of the above, wherein the improved rearing properties of the cultivated rearing P. persimilis population on a non-Tetranychid arthropod prey, are selected from the following parameters: increased daily reproduction rate (λ), increased daily oviposition rate, increased survival rate, lower mortality rate, increased juvenile and/or female survival rate, increased percentage of female individuals reproducing on said prey, and improved or similar predatory behavior towards a Tetranychid species, as compared to a population of P. persimilis individuals characterized by less than 5% individuals comprising within their genome said at least one SNP marker.

[0032] It is a further object of the present invention to disclose the biological control composition as defined in any of the above, wherein said carrier material is selected from particles or elements of sawdust, vermiculite, bran, wheat bran, buckwheat husks, rice husks or millet husks, or comprising a mixture thereof, or any other inert carrier material and/or any carrier having carrier elements comprising surfaces to which mites can adhere or carrier elements comprising mite shelters.

[0033] It is a further object of the present invention to disclose the biological control composition as defined in any of the above, wherein said composition is contained in a container such as a sachet, a bottle or any other packaging type container or device configured to holding the biological control composition.

[0034] It is a further object of the present invention to disclose a method for obtaining a biological control composition comprising a cultivated rearing population of Phytoseiulus persimilis (P. persimilis) predatory mite individuals as defined in any of the above, wherein said method comprises steps of: (a) providing a rearing population of a P. persimilis predatory mite species, the rearing population comprising individuals of the P. persimilis species, reared on a suitable food source for the Phytoseiulus individuals, said food source comprising a prey species selected from the Tetranychidae species; (b) providing a population of individuals of preselected non-Tetranychid arthropod species, preferably an Astigmatid mite species, most preferably an immobilized Astigmatid mite species having immobilized life stages comprising immobilized eggs; (c) rearing the P. persimilis individuals on the preselected non-Tetranychid arthropod species as a food source; (d) screening the genome of a sample of P. persimilis individuals for the presence of at least 5% of at least one SNP selected from: (i) SNP of G at position 34739 of SEQ ID NO:84 or a variant, portion or complementary sequence thereof, (ii) at least one SNP selected from C at position 105452, G at position 109775, A at position 115020, T at position 115073, C at position 125940, G at position 131548, G at position 131555, of SEQ ID NO:85 or a variant, portion or complementary sequence thereof, (iii) at least one SNP selected from A at position 99333, G at position 99595, T at position 99605, A at position 115325, C at position 115354, of SEQ ID NO:86 or a variant, portion or complementary sequence thereof, (iv) at least one SNP selected from A at position 4508, A at position 11697, C at position 12229, A at position 13135, C at position 32979, G at position 38081, C at position 38220 of SEQ ID NO:87 or a variant, portion or complementary sequence thereof, (v) at least one SNP selected from A at position 30913, C at position 34950, C at position 38409, A at position 38458, T at position 42427, G at position 42604, T at position 43158 of SEQ ID NO:88 or a variant, portion or complementary sequence thereof, (vi) SNP of G at position 1032 of SEQ ID NO:89 or a variant, portion or complementary sequence thereof, (vii) SNP of A at position 173977 and/or SNP of T at position 228195 of SEQ ID NO:90 or a variant, portion or complementary sequence thereof, and (viii) at least one SNP selected from C at position 857, T at position 15689, C at position 40135, G at position 49492 of SEQ ID NO:91 or a variant, portion or complementary sequence thereof; (e) optionally, alternatingly rearing selected Phytoseiulus individuals in a sequence of:
[0035] rearing for at least 2, such as between 5 and 50, generations while using a food source comprising the preselected non-Tetranychid arthropod species;
[0036] rearing for at least 2, such as between 5 and 50, generations while using a food source comprising the prey species selected from the Tetranychidae
[0037] screening the genome of a sample of P. persimilis individuals for the presence of at least 5% of the at least one SNP.

[0038] It is a further object of the present invention to disclose the method as defined above, further comprises steps of: (a) separating eggs and/or juvenile developmental stages such as larvae and/or nymphs from the preselected non-Tetranychid arthropod prey rearing population; (b) mixing the separated eggs and/or juvenile developmental stages such as larvae and/or nymphs with a carrier material, such as a carrier material selected from sawdust, wheat bran, buckwheat husks, rice husks or millet husks, or comprising a mixture thereof; (c) freezing the mixture of step (b); and (d) rearing the predatory mite individuals on the mixture as a food source.

[0039] It is a further object of the present invention to disclose the method as defined in any of the above, wherein the provided rearing population is a population composed of a number of sub-populations, wherein said sub-populations are from distinct sources, such as from distinct production populations and/or from natural populations isolated from distinct geographical locations.

[0040] It is a further object of the present invention to disclose the method as defined in any of the above, wherein the provided rearing population comprises at least 100 individuals, such as between 200 and 5000 individuals, preferably between 500 and 1500 individuals.

[0041] It is a further object of the present invention to disclose the method as defined in any of the above, wherein the sample for genome screening comprises at least 50 individuals, such as between 100 and 300 individuals.

[0042] It is a further object of the present invention to disclose use of a biological control composition as defined in any of the above, for controlling a pest in a crop.

[0043] It is a further object of the present invention to disclose a method for controlling a pest in a crop comprising providing the crop with a biological control composition as defined in any of the above.

[0044] It is a further object of the present invention to disclose a method for screening for or identifying a biological control composition as defined in any of the above, the method comprises steps of: (a) obtaining a sample of said population of individuals, the sample preferably comprise at least 50 individuals; (b) pooling the genome said individuals and screening the pooled genome for the presence of at least 5% of at least one SNP selected from:
[0045] i. SNP of G at position 34739 of SEQ ID NO:84 or a variant, portion or complementary sequence thereof,
[0046] ii. at least one SNP selected from C at position 105452, G at position 109775, A at position 115020, T at position 115073, C at position 125940, G at position 131548, G at position 131555, of SEQ ID NO:85 or a variant, portion or complementary sequence thereof,
[0047] iii. at least one SNP selected from A at position 99333, G at position 99595, T at position 99605, A at position 115325, C at position 115354, of SEQ ID NO:86 or a variant, portion or complementary sequence thereof,
[0048] iv. at least one SNP selected from A at position 4508, A at position 11697, C at position 12229, A at position 13135, C at position 32979, G at position 38081, C at position 38220 of SEQ ID NO:87 or a variant, portion or complementary sequence thereof,
[0049] v. at least one SNP selected from A at position 30913, C at position 34950, C at position 38409, A at position 38458, T at position 42427, G at position 42604, T at position 43158 of SEQ ID NO:88 or a variant, portion or complementary sequence thereof,
[0050] vi. SNP of G at position 1032 of SEQ ID NO:89 or a variant, portion or complementary sequence thereof,
[0051] vii. SNP of A at position 173977 and/or SNP of T at position 228195 of SEQ ID NO:90 or a variant, portion or complementary sequence thereof, and
[0052] viii. at least one SNP selected from C at position 857, T at position 15689, C at position 40135, G at position 49492 of SEQ ID NO:91 or a variant, portion or complementary sequence thereof.

[0053] It is a further object of the present invention to disclose a cultivated Phytoseiulus persimilis (P. persimilis) mite individual, wherein said cultivated Phytoseiulus predatory individual comprises within its genome at least one single nucleotide polymorphism (SNP) marker selected from:
[0054] a. SNP1 at position corresponding to position 163 of SEQ ID NO:1 or a variant, portion or complementary sequence thereof,
[0055] b. SNP2 at position 181 of SEQ ID NO:2 or a variant, portion or complementary sequence thereof,
[0056] c. SNP3 at position 197 of SEQ ID NO:3 or a variant, portion or complementary sequence thereof,
[0057] d. SNP4 at position 111 and/or SNP5 at position 165 of SEQ ID NO:4 or a variant, portion or complementary sequence thereof,
[0058] e. SNP6 at position 193 of SEQ ID NO:5 or a variant, portion or complementary sequence thereof,
[0059] f. SNP7 at position 186 and/or SNP8 at position 193 of SEQ ID NO:6 or a variant, portion or complementary sequence thereof,
[0060] g. SNP9 at position 161 of SEQ ID NO:7 or a variant, portion or complementary sequence thereof,
[0061] h. SNP10 at position 203 and/or SNP11 at position 213 of SEQ ID NO:8 or a variant, portion or complementary sequence thereof,
[0062] i. SNP12 at position 163 and/or SNP13 at position 192 of SEQ ID NO:9 or a variant, portion or complementary sequence thereof,
[0063] j. SNP14 at position 208 of SEQ ID NO:10 or a variant, portion or complementary sequence thereof,
[0064] k. SNP15 at position 199 of SEQ ID NO:11 or a variant, portion or complementary sequence thereof,
[0065] l. SNP16 at position 266 of SEQ ID NO:12 or a variant, portion or complementary sequence thereof,
[0066] m. SNP17 at position 216 of SEQ ID NO:13 or a variant, portion or complementary sequence thereof,
[0067] n. SNP18 at position 187 of SEQ ID NO:14 or a variant, portion or complementary sequence thereof,
[0068] o. SNP19 at position 279 of SEQ ID NO:15 or a variant, portion or complementary sequence thereof,
[0069] p. SNP20 at position 188 of SEQ ID NO:16 or a variant, portion or complementary sequence thereof,
[0070] q. SNP21 at position 165 of SEQ ID NO:17 or a variant, portion or complementary sequence thereof,
[0071] r. SNP22 at position 183 of SEQ ID NO:18 or a variant, portion or complementary sequence thereof,
[0072] s. SNP23 at position 133 and/or SNP24 at position 182 of SEQ ID NO:19 or a variant, portion or complementary sequence thereof,
[0073] t. SNP25 at position 146 and/or SNP26 position 323 of SEQ ID NO:20 or a variant, portion or complementary sequence thereof,
[0074] u. SNP27 at position 241 of SEQ ID NO:21 or a variant, portion or complementary sequence thereof,
[0075] v. SNP28 at position 236 of SEQ ID NO:22 or a variant, portion or complementary sequence thereof,
[0076] w. SNP29 at position 199 of SEQ ID NO:23 or a variant, portion or complementary sequence thereof,
[0077] x. SNP30 at position 185 of SEQ ID NO:24 or a variant, portion or complementary sequence thereof,
[0078] y. SNP31 at position 158 of SEQ ID NO:25 or a variant, portion or complementary sequence thereof,
[0079] z. SNP32 at position 143 of SEQ ID NO:26 or a variant, portion or complementary sequence thereof,
[0080] aa. SNP33 at position 157 of SEQ ID NO:27 or a variant, portion or complementary sequence thereof, and
[0081] bb. SNP34 at position 161 of SEQ ID NO:28 or a variant, portion or complementary sequence thereof, and any combination thereof.

[0082] It is a further object of the present invention to disclose the cultivated P. persimilis mite individual as defined in any of the above, wherein said variant comprises at least 90% sequence similarity to the corresponding nucleotide SEQ ID sequence.

[0083] It is a further object of the present invention to disclose the cultivated P. persimilis mite individual as defined in any of the above, wherein said P. persimilis predatory individual comprising within it's genome a polynucleotide sequence selected from SEQ ID NO:1 to SEQ ID NO:28, and any combination thereof.

[0084] It is a further object of the present invention to disclose the cultivated P. persimilis mite individual as defined in any of the above, wherein the at least one SNP is detected using primers comprising pairs of sequences selected from: SEQ ID NO:29 and SEQ ID NO:30 for detection of SNP1, SEQ ID NO:31 and SEQ ID NO:32 for detection of SNP2, SEQ ID NO:33 and SEQ ID NO:34 for detection of SNP3, SEQ ID NO:35 and SEQ ID NO:36 for detection of SNP4-5, SEQ ID NO:37 and SEQ ID NO:38 for detection of SNP6, SEQ ID NO:39 and SEQ ID NO:40 for detection of SNP7-8, SEQ ID NO:41 and SEQ ID NO:42 for detection of SNP9, SEQ ID NO:43 and SEQ ID NO:44 for detection of SNP10-11, SEQ ID NO:45 and SEQ ID NO:46 for detection of SNP12-13, SEQ ID NO:47 and SEQ ID NO:48 for detection of SNP14, SEQ ID NO:49 and SEQ ID NO:50 for detection of SNP15-16, SEQ ID NO:51 and SEQ ID NO:50 for detection of SNP16, SEQ ID NO:52 and SEQ ID NO:53 for detection of SNP17, SEQ ID NO:54 and SEQ ID NO:55 for detection of SNP18, SEQ ID NO:56 and SEQ ID NO:57 for detection of SNP19, SEQ ID NO:58 and SEQ ID NO:59 for detection of SNP20, SEQ ID NO:60 and SEQ ID NO:61 for detection of SNP21, SEQ ID NO:62 and SEQ ID NO:63 for detection of SNP22, SEQ ID NO:64 and SEQ ID NO:65 for detection of SNP23-24, SEQ ID NO:66 and SEQ ID NO:67 for detection of SNP25-26, SEQ ID NO:68 and SEQ ID NO:69 for detection of SNP27, SEQ ID NO:70 and SEQ ID NO:71 for detection of SNP28, SEQ ID NO:72 and SEQ ID NO:73 for detection of SNP29, SEQ ID NO:74 and SEQ ID NO:75 for detection of SNP30, SEQ ID NO:76 and SEQ ID NO:77 for detection of SNP31, SEQ ID NO:78 and SEQ ID NO:79 for detection of SNP32, SEQ ID NO:80 and SEQ ID NO:81 for detection of SNP33, and SEQ ID NO:82 and SEQ ID NO:83 for detection of SNP34.

[0085] It is a further object of the present invention to disclose an isolated cell of the cultivated Phytoseiulus persimilis (P. persimilis) predatory mite as defined in any of the above.

[0086] It is a further object of the present invention to disclose a Phytoseiulus persimilis rearing mite population, wherein at least 5% of the population are the cultivated P. persimilis mite individuals as defined in any of the above.

[0087] It is a further object of the present invention to disclose the Phytoseiulus persimilis rearing mite population as defined in any of the above, wherein the population further comprises a food source for the P. persimilis predatory mites, said food source comprises a non-Tetranychid arthropod as a factitious host, preferably an immobilized non-Tetranychid arthropod prey, such as on an Astigmatid prey, most preferably on an immobilized Astigmatid prey.

[0088] It is a further object of the present invention to disclose the Phytoseiulus persimilis rearing mite population as defined in any of the above, wherein the population is characterized by improved rearing properties on a non-Tetranychid arthropod prey as a food source, preferably on an immobilized non-Tetranychid arthropod prey, such as on an Astigmatid prey, most preferably on an immobilized Astigmatid prey.

[0089] It is a further object of the present invention to disclose the Phytoseiulus persimilis rearing mite population as defined in any of the above, wherein the improved rearing properties on a non-Tetranychid arthropod prey are selected from the following parameters: increased daily reproduction rate (λ), increased daily oviposition rate, increased survival rate, lower mortality rate, increased juvenile and/or female survival rate, increased percentage of female individuals reproducing on said prey, and improved or similar predatory behavior towards a Tetranychid species, as compared to a population of P. persimilis individuals characterized by less than 5% individuals comprising within their genome said at least one SNP marker.

[0090] It is a further object of the present invention to disclose the Phytoseiulus persimilis rearing mite population as defined in any of the above, wherein the population is characterized by a daily reproduction rate (λ) of above 1.06, preferably in the range of 1.10-1.40, such as 1.15-1.40, 1.20-1.40, 1.25-1.40, 1.30-1.40, or 1.10-1.35, 1.10-1.30, 1.10-1.25, 1.10-1.20, while preying on a non-Tetranychid arthropod as a food source, preferably on an immobilized non-Tetranychid arthropod prey, such as on an Astigmatid prey, most preferably on an immobilized Astigmatid prey.

[0091] It is a further object of the present invention to disclose use of a Phytoseiulus persimilis rearing mite population as defined in any of the above, for controlling a pest in a crop.

[0092] It is a further object of the present invention to disclose a method for controlling a pest in a crop comprising providing the crop with a Phytoseiulus persimilis rearing mite population as defined in any of the above.

[0093] It is a further object of the present invention to disclose device for releasing mite individuals of a Phytoseiulus persimilis predatory mite species, said device comprising a container holding a biological control composition as defined in any of the above, or a Phytoseiulus persimilis rearing mite population as defined in any of the above, wherein the device comprises an exit for mobile life stages of the P. persimilis predatory mite species, preferably an exit suitable for providing a sustained release of a number of mobile life stages.

[0094] It is a further object of the present invention to disclose use of a biological control composition as defined in any of the above, or a Phytoseiulus persimilis rearing mite population as defined in any of the above, preferably in a device as defined in any of the above, for crop protection.

[0095] It is a further object of the present invention to disclose use of a non-Tetranychid arthropod species, preferably an immobilized non-Tetranychid arthropod species, such as a non-phytophagous prey, preferably an Astigmatid species, most preferably an immobilized Astigmatid species, such as most preferably an immobilized Astigmatid species, in particular a Carpoglyhus species, having immobilized life stages comprising immobilized eggs, as a food source, preferably as a rearing prey, for a Phytoseiulus persimilis rearing mite population as defined in any of the above.

[0096] It is a further object of the present invention to disclose the use as defined in any of the above, wherein said use comprises applying individuals of a non-Tetranychid arthropod species to a target plant, preferably an immobilized non-Tetranychid arthropod species, such as a non-phytophagous prey, preferably an Astigmatid species, most preferably an immobilized Astigmatid species, such as most preferably an immobilized Astigmatid species, in particular a Carpoglyhus species, having immobilized life stages comprising immobilized eggs, or a mixture of immobilized life stages comprising eggs and mobile stages of the non-Tetranychid arthropod species.

[0097] It is a further object of the present invention to disclose a method for identifying and/or selecting Phytoseiulus persimilis (P. persimilis) predatory mite individuals characterized by improved rearing properties on a non-Tetranychid arthropod prey as a food source, preferably on an immobilized non-Tetranychid arthropod prey, such as on an Astigmatid prey, most preferably on an immobilized Astigmatid prey, wherein said method comprises detecting in the genome of the P. persimilis predatory mite individuals, the presence of a genomic haplotype comprising a single nucleotide polymorphism (SNP) marker at a position corresponding to at least one of: SNP1 at position 163 of SEQ ID NO:1 or a variant, portion or complementary sequence thereof, SNP2 at position 181 of SEQ ID NO:2 or a variant, portion or complementary sequence thereof, SNP3 at position 197 of SEQ ID NO:3 or a variant, portion or complementary sequence thereof, SNP4 at position 111 of SEQ ID NO:4 or a variant, portion or complementary sequence thereof, SNP5 at position 165 of SEQ ID NO:4 or a variant, portion or complementary sequence thereof, SNP6 at position 193 of SEQ ID NO:5 or a variant, portion or complementary sequence thereof, SNP7 at position 186 of SEQ ID NO:6 or a variant, portion or complementary sequence thereof, SNP8 at position 193 of SEQ ID NO:6 or a variant, portion or complementary sequence thereof, SNP9 at position 161 of SEQ ID NO:7 or a variant, portion or complementary sequence thereof, SNP10 at position 203 of SEQ ID NO:8 or a variant, portion or complementary sequence thereof, SNP11 at position 213 of SEQ ID NO:8 or a variant, portion or complementary sequence thereof, SNP12 at position 163 of SEQ ID NO:9 or a variant, portion or complementary sequence thereof, SNP13 at position 192 of SEQ ID NO:9 or a variant, portion or complementary sequence thereof, SNP14 at position 208 of SEQ ID NO:10 or a variant, portion or complementary sequence thereof, SNP15 at position 199 of SEQ ID NO:11 or a variant, portion or complementary sequence thereof, SNP16 at position 266 of SEQ ID NO:12 or a variant, portion or complementary sequence thereof, SNP17 at position 216 of SEQ ID NO:13 or a variant, portion or complementary sequence thereof, SNP18 at position 187 of SEQ ID NO:14 or a variant, portion or complementary sequence thereof, SNP19 at position 279 of SEQ ID NO:15 or a variant, portion or complementary sequence thereof, SNP20 at position 188 of SEQ ID NO:16 or a variant, portion or complementary sequence thereof, SNP21 at position 165 of SEQ ID NO:17 or a variant, portion or complementary sequence thereof, SNP22 at position 183 of SEQ ID NO:18 or a variant, portion or complementary sequence thereof, SNP23 at position 133 of SEQ ID NO:19 or a variant, portion or complementary sequence thereof, SNP24 at position 182 of SEQ ID NO:19 or a variant, portion or complementary sequence thereof, SNP25 at position 146 of SEQ ID NO:20 or a variant, portion or complementary sequence thereof, SNP26 at position 323 of SEQ ID NO:20 or a variant, portion or complementary sequence thereof, SNP27 at position 241 of SEQ ID NO:21 or a variant, portion or complementary sequence thereof, SNP28 at position 236 of SEQ ID NO:22 or a variant, portion or complementary sequence thereof, SNP29 at position 199 of SEQ ID NO:23 or a variant, portion or complementary sequence thereof, SNP30 at position 185 of SEQ ID NO:24 or a variant, portion or complementary sequence thereof, SNP31 at position 158 of SEQ ID NO:25 or a variant, portion or complementary sequence thereof, SNP32 at position 143 of SEQ ID NO:26 or a variant, portion or complementary sequence thereof, SNP33 at position 157 of SEQ ID NO:27 or a variant, portion or complementary sequence thereof, SNP34 at position 161 of SEQ ID NO:28 or a variant, portion or complementary sequence thereof, and any combination thereof.

[0098] It is a further object of the present invention to disclose the method as defined in any of the above, wherein said variant comprises at least 90% similarity to the corresponding nucleotide SEQ ID sequence.

[0099] It is a further object of the present invention to disclose the method as defined in any of the above, wherein said Phytoseiulus predatory individual comprising a polynucleotide genomic sequence selected from SEQ ID NO:1 to SEQ ID NO:28, and any combination thereof.

[0100] It is a further object of the present invention to disclose the method as defined in any of the above, wherein the detection is performed using a primer pair selected from: SEQ ID NO:29 and SEQ ID NO:30 for detection of SNP1, SEQ ID NO:31 and SEQ ID NO:32 for detection of SNP2, SEQ ID NO:33 and SEQ ID NO:34 for detection of SNP3, SEQ ID NO:35 and SEQ ID NO:36 for detection of SNP4-5, SEQ ID NO:37 and SEQ ID NO:38 for detection of SNP6, SEQ ID NO:39 and SEQ ID NO:40 for detection of SNP7-8, SEQ ID NO:41 and SEQ ID NO:42 for detection of SNP9, SEQ ID NO:43 and SEQ ID NO:44 for detection of SNP10-11, SEQ ID NO:45 and SEQ ID NO:46 for detection of SNP12-13, SEQ ID NO:47 and SEQ ID NO:48 for detection of SNP14, SEQ ID NO:49 and SEQ ID NO:50 for detection of SNP15-16, SEQ ID NO:51 and SEQ ID NO:50 for detection of SNP16, SEQ ID NO:52 and SEQ ID NO:53 for detection of SNP17, SEQ ID NO:54 and SEQ ID NO:55 for detection of SNP18, SEQ ID NO:56 and SEQ ID NO:57 for detection of SNP19, SEQ ID NO:58 and SEQ ID NO:59 for detection of SNP20, SEQ ID NO:60 and SEQ ID NO:61 for detection of SNP21, SEQ ID NO:62 and SEQ ID NO:63 for detection of SNP22, SEQ ID NO:64 and SEQ ID NO:65 for detection of SNP23-24, SEQ ID NO:66 and SEQ ID NO:67 for detection of SNP25-26, SEQ ID NO:68 and SEQ ID NO:69 for detection of SNP27, SEQ ID NO:70 and SEQ ID NO:71 for detection of SNP28, SEQ ID NO:72 and SEQ ID NO:73 for detection of SNP29, SEQ ID NO:74 and SEQ ID NO:75 for detection of SNP30, SEQ ID NO:76 and SEQ ID NO:77 for detection of SNP31, SEQ ID NO:78 and SEQ ID NO:79 for detection of SNP32, SEQ ID NO:80 and SEQ ID NO:81 for detection of SNP33, SEQ ID NO:82 and SEQ ID NO:83 for detection of SNP34 and any combination of primer pairs.

[0101] It is a further object of the present invention to disclose the method as defined in any of the above, wherein the improved rearing properties on a non-Tetranychid arthropod prey are selected from the following parameters: increased daily reproduction rate (λ), increased daily oviposition rate, increased survival rate, lower mortality rate, increased juvenile and/or female survival rate, increased percentage of female individuals reproducing on said prey, and improved or similar predatory behavior towards a Tetranychid species, as compared to a population of P. persimilis individuals lacking the at least one SNP and or the polynucleotide sequence selected from SEQ ID NO:1 to SEQ ID NO:28.

[0102] It is a further object of the present invention to disclose a method for identifying and/or selecting a cultivated rearing population of Phytoseiulus persimilis (P. persimilis) predatory mite individuals characterized by improved rearing properties on a non-Tetranychid arthropod prey as a food source, preferably on an immobilized non-Tetranychid arthropod prey, such as on an Astigmatid prey, most preferably on an immobilized Astigmatid prey, wherein said method comprises detecting in the genome of at least 5% of said P. persimilis individuals at least one Single Nucleotide Polymorphism (SNP) marker selected from:
[0103] a. SNP of G at position 34739 of SEQ ID NO:84 or a variant, portion or complementary sequence thereof,
[0104] b. at least one SNP selected from C at position 105452, G at position 109775, A at position 115020, T at position 115073, C at position 125940, G at position 131548, G at position 131555, of SEQ ID NO:85 or a variant, portion or complementary sequence thereof,
[0105] c. at least one SNP selected from A at position 99333, G at position 99595, T at position 99605, A at position 115325, C at position 115354, of SEQ ID NO:86 or a variant, portion or complementary sequence thereof,
[0106] d. at least one SNP selected from A at position 4508, A at position 11697, C at position 12229, A at position 13135, C at position 32979, G at position 38081, C at position 38220 of SEQ ID NO:87 or a variant, portion or complementary sequence thereof,
[0107] e. at least one SNP selected from A at position 30913, C at position 34950, C at position 38409, A at position 38458, T at position 42427, G at position 42604, T at position 43158 of SEQ ID NO:88 or a variant, portion or complementary sequence thereof,
[0108] f. SNP of G at position 1032 of SEQ ID NO:89 or a variant, portion or complementary sequence thereof,
[0109] g. SNP of A at position 173977 and/or SNP of T at position 228195 of SEQ ID NO:90 or a variant, portion or complementary sequence thereof, and
[0110] h. at least one SNP selected from C at position 857, T at position 15689, C at position 40135, G at position 49492 of SEQ ID NO:91 or a variant, portion or complementary sequence thereof.

[0111] It is a further object of the present invention to disclose the method as defined in any of the above, wherein said variant comprises at least 90% sequence similarity to the corresponding SEQ ID nucleotide sequence.

[0112] It is a further object of the present invention to disclose the method as defined in any of the above, wherein at least 5.5%, such as at least 10%, 20%, 30%, 40%, 50%, 60%, 70%, 80%, at least 90% or 100% of said P. persimilis predatory individuals of said cultivated population comprise said at least one SNP marker.

[0113] It is a further object of the present invention to disclose the method as defined in any of the above, wherein the at least 5% of said P. persimilis predatory individuals comprise within their genome a polynucleotide genomic sequence selected from SEQ ID NO:1-28 and SEQ ID NO:84-91, and any combination thereof.

[0114] It is a further object of the present invention to disclose the method as defined in any of the above, wherein the at least 5% of said P. persimilis predatory individuals comprise within their genome a polynucleotide genomic sequence selected from SEQ ID NO:1 to SEQ ID NO:91, and any combination thereof.

[0115] It is a further object of the present invention to disclose the method as defined in any of the above, wherein the cultivated rearing population of P. persimilis predatory mite individuals is characterized by improved rearing properties on a non-Tetranychid arthropod prey as a factious host, preferably on an immobilized non-Tetranychid arthropod prey, such as on an Astigmatid prey, most preferably on an immobilized Astigmatid prey, as compared to a P. persimilis population characterized by less than 5% individuals comprising within their genome said at least one SNP marker.

[0116] It is a further object of the present invention to disclose the method as defined in any of the above, wherein the cultivated rearing population of P. persimilis predatory mite individuals is characterized by a daily reproduction rate (λ) of above 1.06, preferably in the range of 1.10-1.40, such as 1.15-1.40, 1.20-1.40, 1.25-1.40, 1.30-1.40, or 1.10-1.35, 1.10-1.30, 1.10-1.25, 1.10-1.20, while preying on a non-Tetranychid arthropod as a food source, preferably on an immobilized non-Tetranychid arthropod prey, such as on an Astigmatid prey, most preferably on an immobilized Astigmatid prey.

[0117] It is a further object of the present invention to disclose a method for obtaining a Phytoseiulus persimilis rearing mite population characterized by improved rearing properties on a non-Tetranychid arthropod prey as a factious host, preferably on an immobilized non-Tetranychid arthropod prey, such as on an Astigmatid prey, most preferably on an immobilized Astigmatid prey, wherein at least 5% of the population are the cultivated P. persimilis mite individuals as defined in any of the above, said method comprises steps of:
[0118] a. providing a rearing population of a P. persimilis predatory mite species, the rearing population comprising individuals of the P. persimilis species, reared on a suitable food source for the Phytoseiulus individuals, said food source comprising a prey species selected from the Tetranychidae species;
[0119] b. providing a population of individuals of preselected non-Tetranychid arthropod species, preferably an Astigmatid mite species, most preferably an immobilized Astigmatid mite species having immobilized life stages comprising immobilized eggs;
[0120] c. rearing the P. persimilis individuals on the preselected non-Tetranychid arthropod species as a food source;
[0121] d. screening the genome of a sample of P. persimilis individuals for the presence of at least 5% of at least one SNP selected from:
   [0122] i SNP of G at position 34739 of SEQ ID NO:84 or a variant, portion or complementary sequence thereof,
   [0123] ii at least one SNP selected from C at position 105452, G at position 109775, A at position 115020, T at position 115073, C at position 125940, G at position 131548, G at position 131555, of SEQ ID NO:85 or a variant, portion or complementary sequence thereof,
   [0124] iii at least one SNP selected from A at position 99333, G at position 99595, T at position 99605, A at position 115325, C at position 115354, of SEQ ID NO:86 or a variant, portion or complementary sequence thereof,
   [0125] iv at least one SNP selected from A at position 4508, A at position 11697, C at position 12229, A at position 13135, C at position 32979, G at position 38081, C at position 38220 of SEQ ID NO:87 or a variant, portion or complementary sequence thereof,
   [0126] v at least one SNP selected from A at position 30913, C at position 34950, C at position 38409, A at position 38458, T at position 42427, G at position 42604, T at position 43158 of SEQ ID NO:88 or a variant, portion or complementary sequence thereof,
   [0127] vi SNP of G at position 1032 of SEQ ID NO:89 or a variant, portion or complementary sequence thereof,
   [0128] vii SNP of A at position 173977 and/or SNP of T at position 228195 of SEQ ID NO:90 or a variant, portion or complementary sequence thereof, and
   [0129] viii at least one SNP selected from C at position 857, T at position 15689, C at position 40135, G at position 49492 of SEQ ID NO:91 or a variant, portion or complementary sequence thereof;
[0130] e. optionally, alternatingly rearing selected Phytoseiulus individuals in a sequence of:
   [0131] rearing for at least 2, such as between 5 and 50, generations while using a food source comprising the preselected non-Tetranychid arthropod species;
   [0132] rearing for at least 2, such as between 5 and 50, generations while using a food source comprising the prey species selected from the Tetranychidae
   [0133] screening the genome of a sample of P. persimilis individuals for the presence of at least 5% of the at least one SNP.

[0134] It is a further object of the present invention to disclose the method as defined in any of the above, further comprises steps of:
[0135] a. separating eggs and/or juvenile developmental stages such as larvae and/or nymphs from the preselected non-Tetranychid arthropod prey rearing population;
[0136] b. mixing the separated eggs and/or juvenile developmental stages such as larvae and/or nymphs with a carrier material, such as a carrier material selected from sawdust, wheat bran, buckwheat husks, rice husks or millet husks, or comprising a mixture thereof;
[0137] c. freezing the mixture of step (b); and
[0138] d. rearing the predatory mite individuals on the mixture as a food source.

[0139] It is a further object of the present invention to disclose the method as defined in any of the above, wherein the provided rearing population is a population composed of a number of sub-populations, wherein said sub-populations are from distinct sources, such as from distinct production populations and/or from natural populations isolated from distinct geographical locations.

[0140] It is a further object of the present invention to disclose the method as defined in any of the above, wherein the provided rearing population comprises at least 100 individuals, such as between 200 and 5000 individuals, preferably between 500 and 1500 individuals.

[0141] It is a further object of the present invention to disclose the method as defined in any of the above, wherein the sample for genome screening comprises at least 50 individuals, such as between 100 and 300 individuals.

[0142] It is a further object of the present invention to disclose the method as defined in any of the above, wherein the cultivated rearing population of P. persimilis predatory mite individuals is characterized by a daily reproduction rate (λ) of above 1.06, preferably in the range of 1.10-1.40, such as 1.15-1.40, 1.20-1.40, 1.25-1.40, 1.30-1.40, or 1.10-1.35, 1.10-1.30, 1.10-1.25, 1.10-1.20, while preying on a non-Tetranychid arthropod as a food source, preferably on an immobilized non-Tetranychid arthropod prey, such as on an Astigmatid prey, most preferably on an immobilized Astigmatid prey.

[0143] It is a further object of the present invention to disclose an isolated nucleic acid sequence comprising at least 90% similarity to a polynucleotide sequence selected from SEQ ID NO:1 to SEQ ID NO:91 or a portion thereof and any combination thereof.

[0144] It is a further object of the present invention to disclose use of a nucleic acid sequence selected from SEQ ID NO:84 to SEQ ID NO:91 or a portion thereof to identify a rearing population of Phytoseiulus persimilis (P. persimilis) predatory mite individuals characterized by improved rearing properties on a non-Tetranychid arthropod prey as a factitious host, preferably on an immobilized non-Tetranychid arthropod prey, such as on an Astigmatid prey, most preferably on an immobilized Astigmatid prey, wherein at least 5% of said P. persimilis individuals comprise within their genome at least one Single Nucleotide Polymorphism (SNP) marker selected from:
[0145] a. SNP of G at position 34739 of SEQ ID NO:84 or a variant, portion or complementary sequence thereof,
[0146] b. at least one SNP selected from C at position 105452, G at position 109775, A at position 115020, T at position 115073, C at position 125940, G at position 131548, G at position 131555, of SEQ ID NO:85 or a variant, portion or complementary sequence thereof,
[0147] c. at least one SNP selected from A at position 99333, G at position 99595, T at position 99605, A at position 115325, C at position 115354, of SEQ ID NO:86 or a variant, portion or complementary sequence thereof,
[0148] d. at least one SNP selected from A at position 4508, A at position 11697, C at position 12229, A at position 13135, C at position 32979, G at position 38081, C at position 38220 of SEQ ID NO:87 or a variant, portion or complementary sequence thereof,
[0149] e. at least one SNP selected from A at position 30913, C at position 34950, C at position 38409, A at position 38458, T at position 42427, G at position 42604, T at position 43158 of SEQ ID NO:88 or a variant, portion or complementary sequence thereof,
[0150] f. SNP of G at position 1032 of SEQ ID NO:89 or a variant, portion or complementary sequence thereof,
[0151] g. SNP of A at position 173977 and/or SNP of T at position 228195 of SEQ ID NO:90 or a variant, portion or complementary sequence thereof, and
[0152] h. at least one SNP selected from C at position 857, T at position 15689, C at position 40135, G at position 49492 of SEQ ID NO:91 or a variant, portion or complementary sequence thereof.

[0153] It is a further object of the present invention to disclose the use as defined in any of the above, wherein said variant comprises at least 90% sequence similarity to the corresponding SEQ ID nucleotide sequence.

[0154] It is a further object of the present invention to disclose the use as defined in any of the above, wherein at least 5.5%, such as at least 10%, 20%, 30%, 40%, 50%, 60%, 70%, 80%, at least 90% or 100% of said P. persimilis predatory individuals of said population comprise said at least one SNP marker.

[0155] It is a further object of the present invention to disclose the use as defined in any of the above, wherein the rearing population of P. persimilis predatory mite individuals is characterized by a daily reproduction rate (λ) of above 1.06, preferably in the range of 1.10-1.40, such as 1.15-1.40, 1.20-1.40, 1.25-1.40, 1.30-1.40, or 1.10-1.35, 1.10-1.30, 1.10-1.25, 1.10-1.20, while preying on a non-Tetranychid arthropod as a food source, preferably on an immobilized non-Tetranychid arthropod prey, such as on an Astigmatid prey, most preferably on an immobilized Astigmatid prey.

[0156] It is a further object of the present invention to disclose use of a nucleic acid sequence selected from SEQ ID NO:1 to SEQ ID NO:28 or a portion thereof to identify Phytoseiulus persimilis (P. persimilis) predatory mite individuals characterized by improved rearing properties on a non-Tetranychid arthropod prey as a factitious host, preferably on an immobilized non-Tetranychid arthropod prey, such as on an Astigmatid prey, most preferably on an immobilized Astigmatid prey, as compared to Phytoseiulus persimilis (P. persimilis) predatory mite individuals lacking the at least one sequence.

[0157] It is a further object of the present invention to disclose the use as defined in any of the above, wherein the improved rearing properties on a non-Tetranychid arthropod prey are selected from the following parameters: increased daily reproduction rate (λ), increased daily oviposition rate, increased survival rate, lower mortality rate, increased juvenile and/or female survival rate, increased percentage of female individuals reproducing on said prey, and improved or similar predatory behavior towards a Tetranychid species, as compared to a population of P. persimilis individuals lacking the at least one SNP and or the polynucleotide sequence selected from SEQ ID NO:1 to SEQ ID NO:28.

[0158] It is a further object of the present invention to disclose an isolated nucleic acid primer pair sequence comprising at least 90% similarity to a polynucleotide sequence selected from SEQ ID NO:29 to SEQ ID NO:83 and any combination thereof.

[0159] It is a further object of the present invention to disclose use of the isolated nucleic acid primer pair sequence as defined above, for identifying and/or selecting and/or obtaining Phytoseiulus persimilis (P. persimilis) predatory mite individual characterized by improved rearing properties on a non-Tetranychid arthropod prey as a factitious host, preferably on an immobilized non-Tetranychid arthropod prey, such as on an Astigmatid prey, most preferably on an immobilized Astigmatid prey, and/or for obtaining the Phytoseiulus persimilis (P. persimilis) predatory mite population as defined in any of the above, or mite individual as defined in any of the above.

### BRIEF DESCRIPTION OF THE DRAWINGS

[0160] In order to understand the invention and to see how it may be implemented in practice, a plurality of embodiments is adapted to now be described, by way of non-limiting example only, with reference to the accompanying drawings; wherein:

[0161] FIG. 1 is a schematic representation of P+ line genetic marker denomination;

[0162] FIG. 2 is graphically presenting the rate of P+ allele in P+, P− and Alternation P. persimilis populations based on population-wide high-throughput genomic DNA sequencing data;

[0163] FIG. 3 is graphically alternatively presenting results of population-wide high-throughput genomic DNA sequencing showing percentage of similarity to P+ reference allele tested in different sampling times (events) and different population sources (P+, P− and Alternation). The top part of the graph shows average results of the different markers tested, and in the bottom part of the graph, each dot represents the result for a specific marker for each sample; and

[0164] FIG. 4 is graphically presenting Lambda (λ) values of various P+‘continuous’ and ‘Alternating’ population lines.

### DETAILED DESCRIPTION OF THE INVENTION

[0165] In the following detailed description, numerous specific details are set forth in order to provide a thorough understanding of the invention. However, it will be understood by those skilled in the art that the present invention may be practiced without these specific details. In other instances, well-known methods, procedures, and components, modules, units and/or circuits have not been described in detail so as not to obscure the invention. Some features or elements described with respect to one embodiment may be combined with features or elements described with respect to other embodiments. For the sake of clarity, discussion of same or similar features or elements may not be repeated.

[0166] Although embodiments of the invention are not limited in this regard, the terms “plurality” and “a plurality” as used herein may include, for example, “multiple” or “two or more”. The terms “plurality” or “a plurality” may be used throughout the specification to describe two or more components, devices, elements, units, parameters, or the like. The term set when used herein may include one or more items. Unless explicitly stated, the method embodiments described herein are not constrained to a particular order or sequence. Additionally, some of the described method embodiments or elements thereof can occur or be performed simultaneously, at the same point in time, or concurrently.

[0167] In the description of the present application, each of the verbs, “comprise” “include” and “have”, and conjugates thereof, are used to indicate that the object or objects of the verb are not necessarily a complete listing of components, elements or parts of the subject or subjects of the verb. Unless otherwise stated, adjectives such as “substantially” and “about” modifying a condition or relationship characteristic of a feature or features of an embodiment of the disclosure, are understood to mean that the condition or characteristic is defined to within tolerances that are acceptable for operation of an embodiment as described. In addition, the word “or” is considered to be the inclusive “or” rather than the exclusive or, and indicates at least one of, or any combination of items it conjoins.

[0168] The two-spotted spider mite, Tetranychus urticae Koch, is the major spider mite pest of ornamental plants and vegetable crops grown in greenhouses. Furthermore, this ubiquitous spider mite is a serious pest of numerous ornamental plants in home landscapes and is of considerable importance as a pest of food and fiber crops throughout the world (van de Vrie et al., 1972). The predacious phytoseiid mite Phytoseiulus persimilis (P. persimilis) is the major species used to control twos-potted spider mites in greenhouse as well as open field crops.

[0169] Phytoseiulus persimilis is a predatory mite, which specializes on a diet of spider mites. Spider mites are vegetarian mites (phytophagous mites) and therefore require rearing on plants, which involves complex operations and high rearing costs.

[0170] Rearing Phytoseiulus persimilis on other preys (e.g. non-phytophagous preys), which are cheaper to produce, would be therefore highly desirable. The alternative prey mites could be, for example, Astigmatic mites that feed on stored products and are therefore significantly cheaper to produce (see WO2019171374 and WO2021044404 incorporated herein by their entirety).

[0171] It is herein emphasized that up until the current invention there was no availability or publication of sequence information relating to the nuclear genome (or DNA) of P. persimilis, which can be used as reference or benchmark for assessing genetic variations unique for desirable traits such as development and reproduction on a non-Tetranychid factitious host. There is very limited information in NCBI, mostly of few partial genes.

[0172] The present invention provides for the first time whole genome sequencing information of a P. persimilis mite species. Based on the herein generated reference P. persimilis genome, novel and unique genomic haplotypes and molecular markers were identified for P. persimilis mites characterized by the desirable trait of development and reproduction (i.e. improved rearing) on a non-Tetranychid arthropod species (e.g. Astigmatic mite species, e.g. Carpoglyphus lactis).

[0173] The approach used by the present invention for performing the genetic analysis was de novo assembly of whole-genome shotgun sequencing data. This technique enables assembly of a novel genome where there is no reference genome sequence available for alignment. Sequence reads are assembled as contigs, and the coverage quality of the de novo assembly relates to the size and continuity of the contigs (i.e. the number of gaps in the data). This population-wide high-throughput genomic DNA sequencing technology enables fast and accurate characterization of a predetermined species.

[0174] According to embodiments of the present invention, the genetic profiling results of P. persimilis present newly identified haplotypes and genetic markers comprising combinations of genetic variants unique for and associated with P. persimilis populations, which exhibit significantly improved development and reproduction parameters when preying on non-Tetranychid arthropod species, such as Astigmatid mite species (P+ line). It should be emphasized that these unique genetic markers (Single Nucleotide Polymorphisms [SNPs]) were absent in any P. persimilis population tested that does not exhibit the trait of improved development and reproduction on non-Tetranychid arthropod species (P− line).

[0175] According to some embodiments of the present invention, the improved rearing properties on a non-Tetranychid arthropod prey include parameters such as increased daily reproduction rate (λ), increased daily oviposition rate, high percentage of female individuals capable of reproduction on the non-Tetranychid arthropod prey, and enhanced juvenile survival rate, as compared to a non-P+ population growing on non-Tetranychid as the sole prey or food source.

[0176] It is emphasized that the P. persimilis population of the present invention comprising the herein identified unique genomic markers, exhibits a similar and even better ability to control their natural prey, spider mites.

[0177] According to one embodiment, the present invention provides a biological control composition comprising a cultivated rearing population of Phytoseiulus persimilis (P. persimilis) predatory mite individuals, and optionally a carrier.

[0178] According to a further embodiment, at least 5% of the P. persimilis individuals of the population comprise within their genome at least one Single Nucleotide Polymorphism (SNP) marker selected from: SNP at position 34739 of SEQ ID NO:84 or a variant, portion or complementary sequence thereof, at least one SNP at a position selected from 105452, 109775, 115020, 115073, 125940, 131548 and 131555, of SEQ ID NO:85 or a variant, portion or complementary sequence thereof, at least one SNP at a position selected from 99333, 99595, 99605, 115325 and 115354, of SEQ ID NO:86 or a variant, portion or complementary sequence thereof, at least one SNP at a position selected from 4508, 11697, 12229, 13135, 32979, 38081, 38220, of SEQ ID NO:87 or a variant, portion or complementary sequence thereof, at least one SNP at a position selected from 30913, 34950, 38409, 38458, 42427, 42604 and 43158 of SEQ ID NO:88 or a variant, portion or complementary sequence thereof, SNP at position 1032 of SEQ ID NO:89 or a variant, portion or complementary sequence thereof, SNP at position 173977 and/or SNP at position 228195 of SEQ ID NO:90 or a variant, portion or complementary sequence thereof, and at least one SNP at a position selected from 857, 15689, 40135 and 49492 of SEQ ID NO:91 or a variant, portion or complementary sequence thereof.

[0179] It is within scope of the present invention that the variant comprises at least 90% sequence similarity to the corresponding SEQ ID nucleotide sequence.

[0180] It is further within the scope of the present invention that at least 5.5%, such as at least 10%, 20%, 30%, 40%, 50%, 60%, 70%, 80%, at least 90% or 100% of said P. persimilis predatory individuals of said cultivated population comprise said at least one SNP marker.

[0181] According to further aspects of the present invention, the at least 5% of the P. persimilis predatory individuals comprise within their genome a polynucleotide genomic sequence selected from SEQ ID NO:1-28 and SEQ ID NO:84-91, and any combination thereof.

[0182] According to further aspects of the present invention, the at least 5% of the P. persimilis predatory individuals comprise within their genome a polynucleotide genomic sequence selected from SEQ ID NO:1 to SEQ ID NO:91, and any combination thereof.

[0183] According to main aspects of the present invention, the cultivated rearing population of P. persimilis predatory mite individuals is characterized by improved rearing properties on a non-Tetranychid arthropod prey as a factious host or as a food source, preferably on an immobilized non-Tetranychid arthropod prey, such as on an Astigmatid prey, most preferably on an immobilized Astigmatid prey, as compared to a P. persimilis population characterized by less than 5% individuals comprising within their genome said at least one SNP marker.

[0184] According to a further embodiment, the present invention provides a method for identifying and/or selecting Phytoseiulus persimilis (P. persimilis) predatory mite individuals characterized by improved rearing properties on a non-Tetranychid arthropod prey as a factitious host, preferably on an immobilized non-Tetranychid arthropod prey, such as on an Astigmatid prey, most preferably on an immobilized Astigmatid prey.

[0185] Unless defined otherwise, all technical and scientific terms used herein have the same meaning as commonly understood to one of ordinary skill in the art to which the presently disclosed subject matter belongs.

[0186] As used herein the term “about” denotes ±10% of the defined amount or measure or value.

[0187] As used herein the term “similar” denotes a correspondence or resemblance range of about +/−20%, particularly +/−15%, more particularly about +/−10% and even more particularly about +/−5%.

[0188] As used herein the term “average” refers to the mean value as obtained by measuring a predetermined parameter in each individual of a certain population and calculating the mean value according to the number of individuals in said population.

[0189] The term “consists essentially of” (and grammatical variants thereof), as applied to a polynucleotide sequence of this invention, means a polynucleotide sequence that consists of both the recited sequence (e.g., SEQ ID NO) and a total of ten or less (e.g., 1, 2, 3, 4, 5, 6, 7, 8, 9, or 10) additional nucleotides on the 5′ and/or 3′ ends of the recited sequence such that the function of the polynucleotide is not materially altered. The total of ten or less additional nucleotides includes the total number of additional nucleotides on both ends added together.

[0190] A marker or genomic or genetic sequence is “associated with” a trait, phenotype or characteristic when it is linked to it and when the presence of the marker is an indicator of whether and/or to what extent the desired trait or trait form will occur in an organism (mite species)/germplasm comprising the marker. Similarly, a marker is “associated with” an allele when it is linked to it and when the presence of the marker is an indicator of whether the allele is present in an organism (mite species)/germplasm comprising the marker. For example, in the context of the current invention, a genetic marker associated with improved rearing on a non-Tetranychid arthropod prey, refers to a marker whose presence or absence can be used to predict whether and/or to what extent a P. persimilis predatory mite will have the characteristic of developing and reproducing on a non-Tetranychid arthropod prey, such as an immobilized Astigmatid prey (e.g. any SNP allele as described in Table 1 are “associated with” the characteristic of the P. persimilis).

[0191] The term “rearing”, as used herein, broadly refers to breeding, reproducing, multiplication, ovipositing, surviving and growing of individuals, and includes the propagation and increase of a Phytoseiulus population by sexual reproduction.

[0192] The first composition and method of the invention is directed to rearing a predatory mite from the family Phytoseiulus, specifically of the P. persimilis species, characterized by a specific haplotype (at least one SNP) associated with the trait of improved reproducing on a non-Tetranychid arthropod prey, such as an immobilized Astigmatid prey.

[0193] As used herein, the term “improved rearing on a non-Tetranychid arthropod prey” or “improved rearing properties on a non-Tetranychid arthropod prey” refers in the context of the current invention to a phenotypic characteristic of individual P. persimilis predatory mites (cultivated P. persimilis) carrying the genomic haplotype comprising at least one of the genomic markers as described in Tables 2, 3, 5 and 6 (or a complementary sequence thereof), and/or to a population P. persimilis predatory mite individuals (cultivated population) wherein at least 5% of the individuals in the population carry the genomic haplotype comprising at least one of the genomic markers as described in Tables 1, 4 and 7 (or a complementary sequence thereof). The phenotypic characteristic of the P. persimilis predatory mites is defined by exhibiting enhanced development and reproduction while being fed on a non-Tetranychid arthropod prey, such as Astigmatid mite species, preferably immobilized Astigmatid mite species, e.g. comprising immobilized eggs. This phenotypic characteristic or trait is as compared to a population of P. persimilis predatory mite individuals, wherein less than 5% of the individuals in the population carry the genomic haplotype comprising at least one of the genomic markers as described in Tables 1, 4 and 7 (or a complementary sequence thereof).

[0194] In some aspects, the improved rearing phenotype or trait refers to enhanced development and reproduction non-Tetranychid arthropod prey as compared to P. persimilis predatory mites lacking the genomic haplotype comprising at least one of the genomic markers as described in Tables 2, 3, 5 and 6 (or a complementary sequence thereof). In further aspects of the present invention, the improved rearing on a non-Tetranychid arthropod prey include properties such as daily reproduction rate (λ), daily oviposition rate, survival rate, mortality rate, juvenile and/or female survival rate, percentage of female individuals reproducing on said prey, and predatory behavior towards a Tetranychidae species, while preying on a non-Tetranychid arthropod prey.

[0195] The term “population-wide high-throughput genomic DNA sequencing” refers generally to any high-throughput sequencing technology, such as Next Generation Sequencing (NGS) method, population-wide whole-genome shotgun sequencing technology and any large-scale genetic analysis technology.

[0196] As used herein, the term “variant” with respect to a sequence, e.g., a polypeptide or nucleic acid sequence such as—for example—a genomic region nucleotide sequence of the invention, especially, a polynucleotide sequence flanking both sides of the SNP nucleotide position (towards the 5′ and 3′ ends) within genomic regions, contigs or SNPs as listed in Tables 1-7 (or complementary sequences thereof, or having SEQ ID NO:1-91), is intended to mean substantially similar sequences. For nucleotide sequences comprising an open reading frame, variants include those sequences that, because of the degeneracy of the genetic code, encode the identical amino acid sequence of the native protein. Allelic variants can be identified with the use of well-known molecular biology techniques, as, for example, with polymerase chain reaction (PCR), sequencing techniques and hybridization techniques. Variant nucleotide sequences also include synthetically derived nucleotide sequences, such as those generated, for example, by using site-directed mutagenesis. Generally, nucleotide sequence variants of the invention will have at least 30, 40, 50, 60, to 70%, e.g., preferably 71%, 72%, 73%, 74%, 75%, 76%, 77%, 78%, to 79%, generally at least 80%, e.g., 81%-84%, at least 85%, e.g., 86%, 87%, 88%, 89%, 90%, 91%, 92%, 93%, 94%, 95%, 96%, 97%, to 98% and 99% nucleotide sequence identity or sequence similarity to the nucleotide sequence of SEQ ID NO: SEQ ID NO: 1-91.

[0197] The term “cultivated” is herein understood to refer to a mite or mite population, that is no longer in the natural state but has been developed by human care and for human use (e.g. biological control purposes) and/or growing purposes and/or consumption. The term “cultivated” is further understood to exclude those wild-type species, which comprise the trait being subject of this invention as a natural trait and/or part of their natural genetics.

[0198] A cultivated mite population as used herein refers to a P. persimilis population in which at least 5% of its individuals comprise within their genome at least one Single Nucleotide Polymorphism (SNP) marker selected from:
[0199] a. SNP at position 34739 of SEQ ID NO:84 or a variant, portion or complementary sequence thereof,
[0200] b. at least one SNP at a position selected from 105452, 109775, 115020, 115073, 125940, 131548 and 131555, of SEQ ID NO:85 or a variant, portion or complementary sequence thereof,
[0201] c. at least one SNP at a position selected from 99333, 99595, 99605, 115325 and 115354, of SEQ ID NO:86 or a variant, portion or complementary sequence thereof,
[0202] d. at least one SNP at a position selected from 4508, 11697, 12229, 13135, 32979, 38081, 38220, of SEQ ID NO:87 or a variant, portion or complementary sequence thereof,
[0203] e. at least one SNP at a position selected from 30913, 34950, 38409, 38458, 42427, 42604 and 43158 of SEQ ID NO:88 or a variant, portion or complementary sequence thereof,
[0204] f. SNP at position 1032 of SEQ ID NO:89 or a variant, portion or complementary sequence thereof,
[0205] g. SNP at position 173977 and/or SNP at position 228195 of SEQ ID NO:90 or a variant, portion or complementary sequence thereof, and
[0206] h. at least one SNP at a position selected from 857, 15689, 40135 and 49492 of SEQ ID NO:91 or a variant, portion or complementary sequence thereof.

[0207] It is within the scope of the present invention that a cultivated P. persimilis population includes within its meaning mixed cultivated and non-cultivated P. persimilis populations, “Alternating” populations, “continuous” populations and any P+ type population as described herein characterized in that at least 5% of its individuals comprise within their genome at least one Single Nucleotide Polymorphism (SNP) marker selected from:
[0208] a. SNP at position 34739 of SEQ ID NO:84 or a variant, portion or complementary sequence thereof,
[0209] b. at least one SNP at a position selected from 105452, 109775, 115020, 115073, 125940, 131548 and 131555, of SEQ ID NO:85 or a variant, portion or complementary sequence thereof,
[0210] c. at least one SNP at a position selected from 99333, 99595, 99605, 115325 and 115354, of SEQ ID NO:86 or a variant, portion or complementary sequence thereof,
[0211] d. at least one SNP at a position selected from 4508, 11697, 12229, 13135, 32979, 38081, 38220, of SEQ ID NO:87 or a variant, portion or complementary sequence thereof,
[0212] e. at least one SNP at a position selected from 30913, 34950, 38409, 38458, 42427, 42604 and 43158 of SEQ ID NO:88 or a variant, portion or complementary sequence thereof,
[0213] f. SNP at position 1032 of SEQ ID NO:89 or a variant, portion or complementary sequence thereof,
[0214] g. SNP at position 173977 and/or SNP at position 228195 of SEQ ID NO:90 or a variant, portion or complementary sequence thereof, and
[0215] h. at least one SNP at a position selected from 857, 15689, 40135 and 49492 of SEQ ID NO:91 or a variant, portion or complementary sequence thereof.

[0216] According to main embodiments, the cultivated rearing population of P. persimilis predatory mite individuals is characterized by improved rearing properties on a non-Tetranychid arthropod prey as a factious host, preferably on an immobilized non-Tetranychid arthropod prey, such as on an Astigmatid prey, most preferably on an immobilized Astigmatid prey, as compared to a P. persimilis population characterized by less than 5% individuals comprising within their genome said at least one SNP marker.

[0217] It is further within the scope that the cultivated rearing population of P. persimilis predatory mite individuals is characterized by a daily reproduction rate (λ) of above 1.06, preferably in the range of 1.10-1.40, such as 1.15-1.40, 1.20-1.40, 1.25-1.40, 1.30-1.40, or 1.10-1.35, 1.10-1.30, 1.10-1.25, 1.10-1.20, while preying on a non-Tetranychid arthropod as a food source, preferably on an immobilized non-Tetranychid arthropod prey, such as on an Astigmatid prey, most preferably on an immobilized Astigmatid prey.

[0218] A cultivated P. persimilis individual mite refers herein to a Phytoseiulus persimilis (P. persimilis) mite individual comprising within its genome at least one single nucleotide polymorphism (SNP) marker selected from:
[0219] a. SNP1 at position corresponding to position 163 of SEQ ID NO:1 or a variant, portion or complementary sequence thereof,
[0220] b. SNP2 at position 181 of SEQ ID NO:2 or a variant, portion or complementary sequence thereof,
[0221] c. SNP3 at position 197 of SEQ ID NO:3 or a variant, portion or complementary sequence thereof,
[0222] d. SNP4 at position 111 and/or SNP5 at position 165 of SEQ ID NO:4 or a variant, portion or complementary sequence thereof,
[0223] e. SNP6 at position 193 of SEQ ID NO:5 or a variant, portion or complementary sequence thereof,
[0224] f. SNP7 at position 186 and/or SNP8 at position 193 of SEQ ID NO:6 or a variant, portion or complementary sequence thereof,
[0225] g. SNP9 at position 161 of SEQ ID NO:7 or a variant, portion or complementary sequence thereof,
[0226] h. SNP10 at position 203 and/or SNP11 at position 213 of SEQ ID NO:8 or a variant, portion or complementary sequence thereof,
[0227] i. SNP12 at position 163 and/or SNP13 at position 192 of SEQ ID NO:9 or a variant, portion or complementary sequence thereof,
[0228] j. SNP14 at position 208 of SEQ ID NO:10 or a variant, portion or complementary sequence thereof,
[0229] k. SNP15 at position 199 of SEQ ID NO:11 or a variant, portion or complementary sequence thereof,
[0230] l. SNP16 at position 266 of SEQ ID NO:12 or a variant, portion or complementary sequence thereof,
[0231] m. SNP17 at position 216 of SEQ ID NO:13 or a variant, portion or complementary sequence thereof,
[0232] n. SNP18 at position 187 of SEQ ID NO:14 or a variant, portion or complementary sequence thereof,
[0233] o. SNP19 at position 279 of SEQ ID NO:15 or a variant, portion or complementary sequence thereof,
[0234] p. SNP20 at position 188 of SEQ ID NO:16 or a variant, portion or complementary sequence thereof,
[0235] q. SNP21 at position 165 of SEQ ID NO:17 or a variant, portion or complementary sequence thereof,
[0236] r. SNP22 at position 183 of SEQ ID NO:18 or a variant, portion or complementary sequence thereof,
[0237] s. SNP23 at position 133 and/or SNP24 at position 182 of SEQ ID NO:19 or a variant, portion or complementary sequence thereof,
[0238] t. SNP25 at position 146 and/or SNP26 position 323 of SEQ ID NO:20 or a variant, portion or complementary sequence thereof,
[0239] u. SNP27 at position 241 of SEQ ID NO:21 or a variant, portion or complementary sequence thereof,
[0240] v. SNP28 at position 236 of SEQ ID NO:22 or a variant, portion or complementary sequence thereof,
[0241] w. SNP29 at position 199 of SEQ ID NO:23 or a variant, portion or complementary sequence thereof,
[0242] x. SNP30 at position 185 of SEQ ID NO:24 or a variant, portion or complementary sequence thereof,
[0243] y. SNP31 at position 158 of SEQ ID NO:25 or a variant, portion or complementary sequence thereof,
[0244] z. SNP32 at position 143 of SEQ ID NO:26 or a variant, portion or complementary sequence thereof,
[0245] aa. SNP33 at position 157 of SEQ ID NO:27 or a variant, portion or complementary sequence thereof, and
[0246] bb. SNP34 at position 161 of SEQ ID NO:28 or a variant, portion or complementary sequence thereof, and any combination thereof.

[0247] The cultivated P. persimilis individual mite is capable of rearing and reproducing on a non-Tetranychid arthropod prey as a food source (i.e. sole food source), preferably on an immobilized non-Tetranychid arthropod prey, such as on an Astigmatid prey, most preferably on an immobilized Astigmatid prey.

[0248] The term “crop”, as used herein, refers to a plant of economic importance and/or a men-grown plant.

[0249] In a particular embodiment, the plant or crop is selected from the group consisting of vegetables (including cucumber, pepper, eggplant, zucchini, melon, watermelon, tomato, leaf vegetables like lettuce or rocket, potato, beans and onion), orchards, vineyard, olive trees, citrus trees, stone fruit trees, berries, ornamental plants, including pot plants and cut flowers, aromatic plants, and plants for pharmaceutic use like Cannabis. In a more particular embodiment, the plant or crop is selected from the group consisting of pepper, tomato, cucumber and chrysanthemums.

[0250] The term “controlled release” refers hereinafter to slow release, sustained-release, rapid release, designed to release in a prolonged controlled mode or fashion. In the context of the present invention, it refers to predatory mite release to the crop plant gradually over a specified period of time, e.g. throughout the day or over a week or weeks.

[0251] The term “device” or “container” refers hereafter to an apparatus, a unit, a device, a compartment, a member, a strip, sachet, packet, pouch, pocket, sack, a bottle or a bag or any other housing or means for holding or rearing beneficial insects or predatory mites available or known in the art, mite individuals or a mite composition or population. In the context of the present invention, such a container may comprise (i) Phytoseiulus predatory mites, (ii) Phytoseiulus predatory mites with a factitious host (dead Astigmatid mite life-stages or other non-Tetranychid arthropod prey) (iii) a non-Tetranychid arthropod prey, preferably an immobilized non-Tetranychid arthropod prey, such as a non-phytophagous prey, preferably an Astigmatid prey, most preferably an immobilized Astigmatid prey, such as an immobilized Astigmatid prey, in particular a Carpoglyhus prey, having immobilized life stages comprising immobilized eggs, and (iv) optionally a carrier.

[0252] The term “slow release system” or a “device” or a “container” may further refer hereafter to a sachet-type release system, e.g. a sachet, packet, pouch, pocket, sack, a bottle or a bag or any other device or means for releasing the composition or formulation of the present invention. In the context of the present invention, such a composition may comprise (i) Phytoseiulus predatory mites, (ii) Phytoseiulus predatory mites with a factitious host (dead Astigmatid mite life-stages or other non-Tetranychid arthropod prey) (iii) a non-Tetranychid arthropod prey, preferably an immobilized non-Tetranychid arthropod prey, such as a non-phytophagous prey, preferably an Astigmatid prey, most preferably an immobilized Astigmatid prey, such as an immobilized Astigmatid prey, in particular a Carpoglyhus prey, having immobilized life stages comprising immobilized eggs, and (iv) optionally a carrier. It is further included within the scope of the present invention that such a system or container refers to an apparatus, a unit, a device, a compartment, a member, strip or housing for slow release of beneficial insects or predatory mites available or known in the art, which gradually releases the beneficial insects or predatory mites. Having knowledge of such systems, the skilled person will understand that such a gradual release is opposed to immediate release.

[0253] It is also within the scope of the present invention that the Phytoseiulus predatory mite rearing or releasing system may be of any suitable type. In general the mite rearing or releasing system may comprise a container suitable for holding the individuals of the Phytoseiulus predatory mite (e.g. P. persimilis) and individuals of the factitious host mite (e.g. dead or immobilized Asigmatid eggs or juvenile stages). A container for releasing the predatory mites may comprise an opening and/or means for generating an exit opening for mobile stages of the Phytoseiulus predatory mite. Releasing systems of this type are known to the skilled person and/or are commercially available on the market, e.g. sachet-type releasing systems and other suitable types of releasing systems, which are included within the scope of the present invention.

[0254] According to some aspects of the invention, a use of a non-Tetranychid arthropod species comprises an application of individuals of a non-Tetranychid arthropod species on a target crop, preferably an immobilized non-Tetranychid arthropod species, such as a non-phytophagous prey, preferably an Astigmatid species, most preferably an immobilized Astigmatid species, such as an immobilized Astigmatid species, in particular a Carpoglyhus species, having immobilized life stages comprising immobilized eggs (for example a mixture of dead life stages, including dead eggs).

[0255] In a further embodiment, a mixture of eggs and mobile stages of the non-tetranychid prey is applied to a crop plant to be inhabited with Phytoseiulus predatory mites. The purpose of applying the prey directly on the plant is to support a population of P. persimilis or other natural enemy to be established on the plant when Tetranychid prey (the natural host of Phytoseiulus predatory species) is scarce. According to specific embodiments, devices for releasing the mobile stages of the prey, as disclosed in the application, are used.

[0256] The term “rearing composition” as used herein generally refers to a composition suitable for breeding, bringing up, raising, upbringing or propagating a mite species by sexual reproduction. Such a rearing composition and process is performed under artificial conditions, such as in a production (e.g. mass production) setup or system or container and preferably not in the natural growth habitat of the mite species. For example, in the context of the present invention, the rearing composition of P. persimilis may comprise Astigmatid mite species, preferably immobilized Astigmatic mite as a factitious host species for the P. persimilis predators. A rearing composition comprises a rearing population of the mite species, in particular the Phytoseiulus species. A rearing population may comprise sexually mature adults from both sexes, and/or individuals of both sexes of other life stages, e.g. eggs, larvae and/or nymphs, which can mature to sexually mature adults. Alternatively, the rearing population may comprise one or more fertilized females. In essence, a rearing population is capable of increasing the number of its individuals by means of sexual reproduction. More specifically, the term “rearing composition” refers to a composition suitable for the commercial rearing of mites. It is herein acknowledged that mass rearing systems for predatory mites heavily depend on the availability of suitable prey for the predators. Therefore, there is a continuing need to improve rearing systems of both predatory mites and mites suitable as rearing prey. To solve this problem, the present invention provides a composition or system specifically adapted for effectively and efficiently rearing mite species of the genus Phytoseiulus, especially Phytoseiulus persimilis with the unique genomic markers, a highly important predatory mite used for crop pest (spider mites) biological control. For the first time, whole genome information and genomic Single Nucleotide Polymorphism (SNPs) is provided for Phytoseiulus persimilis and especially Phytoseiulus persimilis shown to complete its life cycle and reproduce, i.e. for at least 2 generations, being reared on Astigmatid mite species.

[0257] The term “carrier” refers hereafter to an inactive or inert substance or particles or vehicle. In a preferred embodiment the rearing composition of the present invention comprises a carrier for the individuals of the mite species. The carrier can be any solid material which is suitable to provide a carrier surface to the mite individuals. Examples of suitable carriers are plant materials such as bran (e.g. wheat), sawdust (e.g. fine sawdust), corn cob grits, vermiculite, Poaceae husks, such as millet husks, or rice husks, etc. According to further aspects of the invention, a carrier material may include sawdust, wheat bran, buckwheat husks, rice husks or millet husks, or comprising a mixture thereof, preferably a carrier having elements comprising mite shelters and/or comprising surfaces to which mites can adhere.

[0258] The term “Phytoseiulus” as used hereafter refers to a genus of mites in the Phytoseiidae family. This genus of predatory mites is most frequently used to control two-spotted spider mites in greenhouses and outdoor crops. It is within the scope of the present invention that the genus Phytoseiulus contains the following species: Phytoseiulus fragariae, Phytoseiulus longipes, Phytoseiulus macropilis, Phytoseiulus persimilis, Phytoseiulus robertsi and Mesoseiulus longipes (e.g. see https://www.benemite.com/mlongipes.htm). The Phytoseiulus predatory mites are known as specialists for spider mites (mites of the family Tetranychidae) which are phytophagous mites.

[0259] The term “Phytoseiulus persimilis” or “P. persimilis” as used hereafter refers to a predatory mite population comprising the Phytoseiulus persimilis (P. persimilis). Phytoseiulus is a genus of mites in the Phytoseiidae family. This predatory mite is the mite predator most frequently used to control two-spotted spider mites in greenhouses and outdoor crops grown in mild environments.

[0260] P. persimilis is generally used for spider mite control and management. They are voracious predators of most of the spider mite pests (Tetranychus spp). Some of the species they impact include: the two-spotted mite Tetranychus urticae, the carmine red mite T. cinnabarinus, and the Pacific mite T. pacificus. Unlike Neoseiulus calfornicus (Order: Mesostigmata, Family: Phytoseiidae, Subfamily: Amblyseiinae) which may not eat for relatively long periods, Phytoseiulus persimilis must have fresh feed. Furthermore, according to existing knowledge Phytoseiulus persimilis is not flexible by its diet as other available predatory mite species for spider mite control, since it is known to only feed upon specific Tetranychus species, but not all of them.

[0261] The present invention discloses for the first time genomic sequences, haplotype and SNPs for P. persimilis populations successfully developed and reproduced on non-Tetranychid arthropod prey, in particular selected from the order Astigmata and from the immobilized Phytoseiidae. On the basis of the surprising finding that Phytoseiulus species, contrary to the general conviction in the art, can develop and reproduce on non-Tetranychid arthropod prey, new genetic markers are provided herein to identify and select for the desirable trait. Such unique and novel SNPs provide genetic tools that previously were not known and available for production, selection and for much more effective rearing and breeding of P. persimilis on the alternative diet compared to rearing P. persimilis on its conventional diet, which consists of phytophagous mites.

[0262] The term “factitious host” generally refers hereafter to an unnatural host or host other than the target host for the predatory mite; one that biocontrol practitioners may more readily rear under laboratory conditions compared to the natural host. In the context of the present invention, factitious host or prey refers to organisms unlikely to be attacked by a natural enemy or predatory mite in its natural habitat, but that is artificially used to support the natural enemy's development and/or reproduction. Usually it is a species that is easier and less expensive to rear. Examples within the scope of the present invention include storage mites (such as Astigmatid mites) for predatory mites (such as Phytoseiulus mite species), mite eggs for predatory insects and mites. According to further aspects, the term factitious host is used when a biological control agent is forced to feed on an insect or mite that it would not feed upon in nature. This can allow higher production levels. The present invention shows for the first time that species of commercially available Phytoseiulus mites can be mass reared using Astigmatid mites (Acari: Astigmata) as factitious prey.

[0263] The term “juvenile mite” or “juvenile mites” refers hereafter to mite developmental life stages or mite developmental phases or instar including egg, larva, nymphs e.g. protonymph and deutonymph (third instar) individuals.

[0264] The term “individual” or “individuals” or “mite individuals” refers in the context of the present invention to mite developmental stages including, but not limited to eggs, juvenile mite stages such as larva, protonymph and deutonymph (third instar) and adult individuals.

[0265] The term “mobile stages” refers hereafter to mite developmental stages including larva, protonymph, deutonymph (third instar) and adult stages.

[0266] The term “immobilized” used hereafter generally means that the non-Tetranychid arthropod prey individuals, preferably Astigmatid individuals, have been subjected to an immobilization treatment. An immobilization treatment should be construed to mean a treatment which impairs the motility that a prey individual has in any of its life stages (including immobile stages, i.e. eggs and any mobile developmental stage). Motility being the capability of moving spontaneously and independently. As the skilled person is aware of, life stages of mites which are motile are larvae, nymphs and adults. Thus treatments that impair the motility of any of these stages should be considered to be an immobilization treatment. In addition, treatments that prevent individuals to develop from a non-motile life stage, such as from the egg stage, to a motile life stage, should also be considered an immobilization treatment. According to a preferred embodiment, the immobilized mite individuals comprise eggs, larvae, nymphs or adults, preferably live stages comprising eggs, most preferably eggs combined with juvenile live stages. According to a further preferred embodiment, the prey individuals are permanently immobilized. A treatment rendering the prey individuals, preferably Astigmatid mites, “non-viable” (i.e causing death) may be considered a permanently immobilizing treatment. According to some embodiments of the present invention, the immobilized, preferably non-viable mite individuals are produced by or exposed to a treatment including, but not limited to, thermal treatment, such as freezing, freeze-drying, heating, cold-shock or heat-shock treatment; chemical treatment, such as gas or fume treatment; radiation treatment, such as UV, microwave, gamma irradiation or X-ray treatment; mechanical treatment, such as vigorous shaking, or stirring, subjecting to shear forces, collision; gas pressure treatment, such as ultrasound treatment, pressure changes, pressure drops; electrical treatment, such as electrocution; immobilizing with an adhesive; immobilization by starvation, such as induced by water or food deprivation; immobilization by suffocation or anoxia treatment, such as by temporarily eliminating oxygen from the atmosphere or replacing oxygen by another gas and any combination thereof. WO2013/103294 further discloses immobilized Astigmatid mites and methods for obtaining them. As the non-tetranychod prey, non-hatching eggs of Astigmatid mites (e.g. immobilized by freezing or by radiation treatment), more preferably in combination with immobilized, in particular non-viable, juvenile Astigmatid live stages are most preferred in the context of the present invention.

[0267] The term “non-viable” used hereafter generally means not capable of living, growing, developing, or functioning. According to main aspects of the present invention it refers to dead or not alive or non-living or immobilized mites (i.e. any mite developmental stage or phase) or mite eggs. In a specific embodiment of the present invention, non-viable Astigmata mites and/or eggs are used as a prey for predatory mites of the Phytoseiulus genus.

[0268] According to a specific embodiment, the composition of the present invention comprises C. lactis eggs and/or mites and/or larvae or nymphs, immobilized by freezing, used as a prey or a food source for predatory mites of the Phytoseiulus genus. According to an aspect of the invention, the eggs mites and/or larvae may be non-viable or dead.

[0269] The term “Astigmatid” or “Astigmata” or “Astigmatic mites” or “Astigmatina” as used herein refers to mites order within the Subclass: Acari. The Astigmatina are a “cohort” of mites. Astigmatina belongs to the Sarcoptiformes, which contains the “biting” Acariformes. The Astigmata order contains superfamilies with over thousands of genera. Non limiting examples of such superfamilies and families, within the scope of the present invention may include:
[0270] Suborder: Acaridia
[0271] Superfamilies:
[0272] Schizoglyphoidea: examples of families include: Schizoglyphidae
[0273] Histiostomatoidea: examples of families include: Histiostomatidae, Guanolichidae
[0274] Canestrinioidea: examples of families include: Chetochelacaridae, Lophonotacaridae, Canestriniidae, Heterocoptidae
[0275] Hemisarcoptoidea: examples of families include: Chaetodactylidae, Hyadesiidae, Carpoglyphidae, Algophagidae, Hemisarcoptidae, Winterschmidtiidae
[0276] Glycyphagoidea: examples of families include: Euglycyphagidae, Chortoglyphidae, Pedetropodidae, Echimyopodidae, Aeroglyphidae, Rosensteiniidae, Glycyphagidae
[0277] Acaroidea: examples of families include: Sapracaridae, Suidasiidae, Lardoglyphidae, Glycacaridae, Gaudiellidae
[0278] Acaridae: examples of families include: Hypoderoidea, Hypoderidae
[0279] Suborder: Psoroptidia
[0280] Superfamilies:
[0281] Pterolichoidea: examples of families include: Oconnoriidae, Ptiloxenidae
[0282] Pterolichidae: examples of families include: Cheylabididae, Ochrolichidae, Gabuciniidae, Falculiferidae, Eustathiidae, Crypturoptidae, Thoracosathesidae, Rectijanuidae, Ascouracaridae, Syringobiidae, Kiwilichidae, Kramerellidae
[0283] Freyanoidea: examples of families include: Freyanidae, Vexillariidae, Caudiferidae
[0284] Analgoidea: examples of families include: Heteropsoridae, Analgidae, Xolalgidae, Avenzoariidae, Pteronyssidae, Proctophyllodidae, Psoroptoididae, Trouessartiidae, Alloptidae, Thysanocercidae, Dermationidae, Epidermoptidae, Apionacaridae, Dermoglyphidae, Laminosioptidae, Knemidokoptidae, Cytoditidae
[0285] Pyroglyphoidea: examples of families include: Pyroglyphidae, Turbinoptidae
[0286] Psoroptoidea: examples of families include: Psoroptidae, Galagalgidae, Lobalgidae, Myocoptidae, Rhyncoptidae, Audycoptidae, Listrophoridae, Chirodiscidae, Atopomelidae, Chirorhynchobiidae, Gastronyssidae, Lemurnyssidae, Pneumocoptidae, Sarcoptidae.

[0287] The claims further present Astigmatid species suitable as the non-Tetranychid arthropod prey in embodiments of the different aspects of the invention. According to many embodiments of the different aspects of the invention, selection of a non-Tetranychid arthropod prey from an Astigmatid species is most preferred. When used as a food source for the Phytoseiulus species, Astigmatid individuals are most preferably used in immobilized form, in particular in an immobilized form having immobilized life stages comprising immobilized (non-hatching) eggs. Immobilization by freezing is in particular suitable and is the most preferred method of immobilization for Astigmatid individuals. Immobilization by irradiation treatment is an alternative highly favorable immobilization method.

[0288] A preferable Astigmatid mite species used by the biological control system of the present invention as a factitious host population for the Phytoseiulus predatory mite, e.g. P. persimilis, is a mite species of the Carpoglyphidae family, more preferably Carpoglyphus lactis (C. lactis).

[0289] Carpoglyphidae is a mite family in the order Astigmatina, containing four genera: Carpoglyphus, Coproglyphus, Dichotomiopus and Pullea.

[0290] Carpoglyphus lactis), which is most preferably used by the present invention as a diet for rearing P. persimilis, belongs to the Carpoglyphus genus. Carpoglyphus lactis is acknowledged herein as a stored product mite, infesting saccharide-rich stored commodities including dried fruits, wine, beer, milk products, jams and honey. Since C. lactis is capable of feeding on stored products, it is highly desirable and cost effective to raise P. persimilis on this mite species, as shown for the first time by the present invention. When used as a food source for the Phytoseiulus species, Carpoglyphus lactis individuals are most preferably used in an immobilized form, in particular having immobilized life stages comprising immobilized (non-hatching) eggs (and/or immobilized mites). Immobilization by freezing is in particular suitable and the most preferred method of immobilization for Carpoglyphus lactis.

[0291] In a further embodiment of the different aspects of the present invention, the Phytoseiulus predatory mite, e.g. P. persimilis, can complete its life cycle and reproduce when feeding on immobilized, in particular non-viable mites and/or eggs of the species Carpoglyphus lactis and/or Dermatophagoides farinae both belonging to the Astigmata order.

[0292] The term “phenotype” refers hereafter to the composite of the organism's observable characteristics or traits, including its morphology or physical form and structure; its developmental processes; its biochemical and physiological properties; its behavior, and the products of behavior (diet or food source). An organism's phenotype may result from two basic factors: the expression of an organism's genetic code, or its genotype or genomic composition, and the influence of environmental factors, which may interact, further affecting phenotype. It is within the scope of the current invention that an improved development and reproduction on a non-Tetranychid arthropod prey is a phenotype or phenotypic characteristic or trait of the predatory Phytoseiulus mite individuals of the invention. As used herein, the terms “phenotype,” “phenotypic trait” or “trait” refer to one or more traits and/or manifestations of an organism. The phenotype can be a manifestation that is observable to the naked eye, or by any other means of evaluation known in the art, e.g., microscopy, biochemical analysis, behavior such as feeding or diet restrictions or capabilities, or an electromechanical assay. In some cases, a phenotype or trait is directly controlled by a single gene or genetic locus, i.e., a “single gene trait.” In other cases, a phenotype or trait is the result of several genes.

[0293] The term “trait” refers hereafter to characteristic or phenotype. A phenotypic trait may refer to the appearance or other detectable characteristic of an individual, resulting from the interaction of its genome, proteome and/or metabolome with the environment. For example, in the context of the present invention improved reproduction or an increased reproduction rate as described herein is a phenotypical trait characterizing the predatory mites of the present invention. According to a further embodiment of the present invention, a trait may also arise from interaction between the mite and its associated microorganisms. A trait may be inherited in a dominant or recessive manner, or in a partial or incomplete-dominant manner. A trait may be monogenic (i.e. determined by a single locus) or polygenic (i.e. determined by more than one locus) or may also result from the interaction of one or more genes with the environment. A dominant trait results in a complete phenotypic manifestation at heterozygous or homozygous state; conventionally, a recessive trait manifests itself only when present at homozygous state. A trait may be associated, co-segregated, in linkage or in coupling phase with a nucleic acid sequence of a gene or one or more genomic loci, or a genetic marker such as Single Nucleotide Polymorphism (SNP), an inversion, a deletion or an indel.

[0294] The term “genetic linkage” is understood within the scope of the invention to refer to an association of characters in inheritance due to location of genes in proximity on the same chromosome, measured by percent recombination between loci (centiorgan, cM).

[0295] As used herein, the term “linkage” refers to the degree with which one marker locus is associated with another marker locus or some other locus (for example, improved rearing on a non-Tetranychid arthropod prey locus). The linkage relationship between a molecular marker and a phenotype may be given as a “probability” or “adjusted probability.” Linkage can be expressed as a desired limit or range. For example, in some embodiments, any marker is linked (genetically and physically) to any other marker when the markers are separated by less than about 50, 40, 30, 25, 20, or 15 map units (or cM). For example, embodiments of the invention herein, provide for marker loci closely linked to chromosomal regions comprising a nucleotide sequence of any one of SEQ ID NOs 1-91, associated with the trait of improved rearing (development and reproduction) on a non-Tetranychid arthropod prey.

[0296] A centimorgan (“cM”) is a unit of measure of recombination frequency. One cM is equal to a 1% chance that a marker at one genetic locus will be separated from a marker at a second locus due to crossing over in a single generation.

[0297] As used herein, the term “population” refers to a plurality of individuals. According to some embodiments the term includes a genetically heterogeneous collection of mites sharing a common genetic derivation or to a line.

[0298] In the context of the current invention, two distinct Phytoseiulus species lines, e.g. P. persimilis populations are herein disclosed. A line of populations, designated as P+ in which at least 5% of said P. persimilis individuals comprise within their genome at least one Single Nucleotide Polymorphism (SNP) marker selected from:
[0299] a. SNP at position 34739 of SEQ ID NO:84 or a variant, portion or complementary sequence thereof,
[0300] b. at least one SNP at a position selected from 105452, 109775, 115020, 115073, 125940, 131548 and 131555, of SEQ ID NO:85 or a variant, portion or complementary sequence thereof,
[0301] c. at least one SNP at a position selected from 99333, 99595, 99605, 115325 and 115354, of SEQ ID NO:86 or a variant, portion or complementary sequence thereof,
[0302] d. at least one SNP at a position selected from 4508, 11697, 12229, 13135, 32979, 38081, 38220, of SEQ ID NO:87 or a variant, portion or complementary sequence thereof,
[0303] e. at least one SNP at a position selected from 30913, 34950, 38409, 38458, 42427, 42604 and 43158 of SEQ ID NO:88 or a variant, portion or complementary sequence thereof,
[0304] f. SNP at position 1032 of SEQ ID NO:89 or a variant, portion or complementary sequence thereof,
[0305] g. SNP at position 173977 and/or SNP at position 228195 of SEQ ID NO:90 or a variant, portion or complementary sequence thereof, and
[0306] h. at least one SNP at a position selected from 857, 15689, 40135 and 49492 of SEQ ID NO:91 or a variant, portion or complementary sequence thereof.

[0307] In the context of the present invention, a P+ type population include “Alternating” population and “continuous” application.

[0308] This line of populations is reared and selected on a non-Tetranychid arthropod prey, preferably on an immobilized non-Tetranychid arthropod prey, such as on a non-phytophagous prey, preferably on an Astigmatid prey, most preferably on an immobilized Astigmatid prey, such as an immobilized Astigmatid prey, in particular a Carpoglyhus prey, having immobilized life stages comprising immobilized eggs. In some aspects of the invention, the P+ population is characterized by improved reproduction on the non-Tetranychid arthropod prey, defined herein by parameters such as daily reproduction rate, daily oviposition rate, female and/or juvenile survival rate and percentage of female individuals capable of reproducing on the non-Tetranychid arthropod prey. This phenotypic trait is as compared to a population of P. persimilis individuals characterized by less than 5% individuals comprising within their genome said at least one SNP marker (P− population or non-P+ population).

[0309] Such a P+ type population of P. persimilis predatory mite individuals is characterized by a daily reproduction rate (λ) of above 1.06, preferably in the range of 1.10-1.40, such as 1.15-1.40, 1.20-1.40, 1.25-1.40, 1.30-1.40, or 1.10-1.35, 1.10-1.30, 1.10-1.25, 1.10-1.20, while preying on a non-Tetranychid arthropod as a food source, preferably on an immobilized non-Tetranychid arthropod prey, such as on an Astigmatid prey, most preferably on an immobilized Astigmatid prey.

[0310] The second line of populations (designated non-P+, or P−) is a population in which less than 5% of the individuals comprising within their genome said at least one SNP marker selected from:
[0311] a. SNP at position 34739 of SEQ ID NO:84 or a variant, portion or complementary sequence thereof,
[0312] b. at least one SNP at a position selected from 105452, 109775, 115020, 115073, 125940, 131548 and 131555, of SEQ ID NO:85 or a variant, portion or complementary sequence thereof,
[0313] c. at least one SNP at a position selected from 99333, 99595, 99605, 115325 and 115354, of SEQ ID NO:86 or a variant, portion or complementary sequence thereof,
[0314] d. at least one SNP at a position selected from 4508, 11697, 12229, 13135, 32979, 38081, 38220, of SEQ ID NO:87 or a variant, portion or complementary sequence thereof,
[0315] e. at least one SNP at a position selected from 30913, 34950, 38409, 38458, 42427, 42604 and 43158 of SEQ ID NO:88 or a variant, portion or complementary sequence thereof,
[0316] f. SNP at position 1032 of SEQ ID NO:89 or a variant, portion or complementary sequence thereof,
[0317] g. SNP at position 173977 and/or SNP at position 228195 of SEQ ID NO:90 or a variant, portion or complementary sequence thereof, and
[0318] h. at least one SNP at a position selected from 857, 15689, 40135 and 49492 of SEQ ID NO:91 or a variant, portion or complementary sequence thereof.

[0319] The P. persimilis P− line is continuously reared on its natural host, namely Tetranychid arthropod prey, or spider mites as the sole food source. In further aspects, the P. persimilis P− line is absent of the improved rearing properties on a non-Tetranychid arthropod as a food source, preferably on an immobilized non-Tetranychid arthropod prey, such as on an Astigmatid prey, most preferably on an immobilized Astigmatid prey. The P. persimilis P− line is further characterized by a daily reproduction rate (λ) equal or lower than 1.06.

[0320] The P− population is also referred to as wild type or the traditionally reared or commercially or naturally available Phytoseiulus or P. persimilis population, or conventionally reared population or non-selected population or control population or a Phytoseiulus population.

[0321] The term “contig” refers hereafter to a set of overlapping DNA segments that together represent a consensus region of DNA. In bottom-up sequencing projects, a contig refers to overlapping sequence data (reads); in top-down sequencing projects, contig refers to the overlapping clones that form a physical map of the genome that is used to guide sequencing and assembly. Contigs can thus refer both to overlapping DNA sequence and to overlapping physical segments (fragments) contained in clones depending on the context.

[0322] The term “scaffold” generally refers herein to a portion of the genome sequence reconstructed from end-sequenced whole-genome shotgun clones. Scaffolds are composed of contigs and gaps. A contig is a contiguous length of genomic sequence in which the order of bases is known to a high confidence level. Gaps occur where reads from the two sequenced ends of at least one fragment overlap with other reads in two different contigs (as long as the arrangement is otherwise consistent with the contigs being adjacent). Since the lengths of the fragments are roughly known, the number of bases between contigs can be estimated.

[0323] As used herein, the phrase “genetic marker” or “molecular marker” or “genomic marker” or “biomarker” refers to a feature in an individual's genome e.g., a nucleotide or a polynucleotide sequence that is associated with one or more loci or trait of interest In some embodiments, a genetic marker is polymorphic in a population of interest, or the locus occupied by the polymorphism, depending on context. A marker may be, but is not limited to, an allele, a gene or a haplotype. Genetic markers or molecular markers include, for example, Single Nucleotide Polymorphisms (SNPs), indels (i.e. insertions deletions), Simple Sequence Repeats (SSRs), Restriction Fragment Length Polymorphisms (RFLPs), Random Amplified Polymorphic DNAs (RAFDs), Cleaved Amplified Polymorphic Sequence (CAPS) markers, Diversity Arrays Technology (DArT) markers, and Amplified Fragment Length Polymorphisms (AFLPs) or combinations thereof, among many other examples such as the DNA sequence per se. Genetic markers can, for example, be used to locate genetic loci containing alleles on a chromosome that contribute to variability of phenotypic traits. The phrase “genetic marker” or “molecular marker” or “biomarker” can also refer to a polynucleotide sequence complementary or corresponding to a genomic sequence, such as a sequence of a nucleic acid used as a probe or primer.

[0324] A genetic marker can be physically located in a position on a chromosome that is within or outside of the genetic locus with which it is associated (i.e., is intragenic or extragenic, respectively).

[0325] According to A genomic marker may be in a heterozygous state or in a homozygous state within the genome.

[0326] As used herein, the terms “marker” and “genetic marker” are used interchangeably to refer to a nucleotide and/or a nucleotide sequence that has been associated with a phenotype, trait or trait form. In some embodiments, a marker may be associated with an allele or alleles of interest and may be indicative of the presence or absence of the allele or alleles of interest in a cell or organism. A marker may be present in genomic or expressed nucleic acids (e.g., ESTs). The term marker may also refer to nucleic acids used as probes or primers (e.g., primer pairs) for use in amplifying, hybridizing to and/or detecting nucleic acid molecules according to methods well known in the art.

[0327] Markers corresponding to genetic polymorphisms between members of a population can be detected by methods well-established in the art. These include, e.g., nucleic acid sequencing, hybridization methods, amplification methods (e.g., PCR-based sequence specific amplification methods), detection of restriction fragment length polymorphisms (RFLP), detection of isozyme markers, detection of polynucleotide polymorphisms by allele specific hybridization (ASF1), detection of amplified variable sequences of the organism genome, detection of self-sustained sequence replication, detection of simple sequence repeats (SSRs), detection of single nucleotide polymorphisms (SNPs), and/or detection of amplified fragment length polymorphisms (AFLPs).

[0328] A “marker allele,” also described as an “allele of a marker locus,” can refer to one of a plurality of polymorphic nucleotide sequences found at a marker locus in a population that is polymorphic for the marker locus.

[0329] “Marker-assisted selection” (MAS) is a process by which phenotypes are selected based on marker genotypes. In some embodiments, marker genotypes are used to identify individuals that will be selected for a breeding program. In some embodiments, marker genotypes are used to identify individuals that will not be selected for a breeding program (i.e., counter-selected organisms or individuals), allowing them to be removed from the breeding population.

[0330] As used herein, the terms “marker locus” and “marker loci” refer to a specific chromosome location or locations in the genome of an organism where a specific marker or markers can be found. A marker locus can be used to track the presence of a second linked locus, e.g., a linked locus that encodes or contributes to expression of a phenotypic trait. For example, a marker locus can be used to monitor segregation of alleles at a locus, such as a QTL or single gene, that are genetically or physically linked to the marker locus.

[0331] As used herein, the terms “marker probe” and “probe” refer to a nucleotide sequence or nucleic acid molecule that can be used to detect the presence of one or more particular alleles within a marker locus (e.g., a nucleic acid probe that is complementary to all of or a portion of the marker or marker locus, through nucleic acid hybridization). Marker probes comprising about 8, 10, 15, 20, 30, 40, 50, 60, 70, 80, 90, 100 or more contiguous nucleotides may be used for nucleic acid hybridization. Alternatively, in some aspects, a marker probe refers to a probe of any type that is able to distinguish (i.e., genotype) the particular allele that is present at a marker locus.

[0332] As used herein, the terms “molecular marker” or “genetic marker” may be used to refer to a genetic marker, as defined above, or an encoded product thereof (e.g., a protein) used as a point of reference when identifying a linked locus. A molecular marker can be derived from genomic nucleotide sequences or from expressed nucleotide sequences (e.g., from a spliced RNA, a cDNA, etc.). The term also refers to nucleotide sequences complementary to or flanking the marker sequences, such as nucleotide sequences used as probes and/or primers capable of amplifying the marker sequence. Nucleotide sequences are “complementary” when they specifically hybridize in solution, e.g., according to Watson-Crick base pairing rules. Any suitable marker detection technology may be used to identify such a hybridization marker, e.g., SNP technology is used in the examples provided herein.

[0333] A non-naturally occurring P. persimilis line or population is any P. persimilis genome of a line or population that does not naturally exist in nature. This non-naturally occurring P. persimilis contain (or at least 5% of the population contain) the haplotype/markers of the present invention (see Tables 1-7).

[0334] As used herein, the term “primer” refers to an oligonucleotide which is capable of annealing to a nucleic acid target and serving as a point of initiation of DNA synthesis when placed under conditions in which synthesis of a primer extension product is induced (e.g., in the presence of nucleotides and an agent for polymerization such as DNA polymerase and at a suitable temperature and pH). A primer (in some embodiments an extension primer and in some embodiments an amplification primer) is in some embodiments single stranded for maximum efficiency in extension and/or amplification. In some embodiments, the primer is an oligodeoxyribonucleotide. A primer is typically sufficiently long to prime the synthesis of extension and/or amplification products in the presence of the agent for polymerization. The minimum length of the primer can depend on many factors, including, but not limited to temperature and composition (A/T vs. G/C content) of the primer. In the context of amplification primers, these are typically provided as a pair of bi-directional primers consisting of one forward and one reverse primer or provided as a pair of forward primers as commonly used in the art of DNA amplification such as in PCR amplification. As such, it will be understood that the term “primer,” as used herein, can refer to more than one primer. Hence, a “primer” can include a collection of primer oligonucleotides containing sequences representing the possible variations in the sequence or includes nucleotides which allow a typical base pairing. Primers can be prepared by any suitable method known in the art. Methods for preparing oligonucleotides of specific sequence are known in the art, and include, for example, cloning and restriction of appropriate sequences and direct chemical synthesis. Primers diagnostic (i.e. able to identify or select based on presence of the unique P. persimilis genomic regions associate with improved development and reproduction on a non-Tetranychid arthropod prey) can be created to any favorable SNP as described in any one of Tables 1-2. The PCR method is well described in handbooks and known to the skilled person. After amplification by PCR, target polynucleotides can be detected by hybridization with a probe polynucleotide, which forms a stable hybrid with the target sequence under stringent to moderately stringent hybridization and wash conditions. If it is expected that the probes are essentially completely complementary (i.e., about 99% or greater) to the target sequence, stringent conditions can be used. If some mismatching is expected, for example if variant strains are expected with the result that the probe will not be completely complementary, the stringency of hybridization can be reduced. In some embodiments, conditions are chosen to rule out non specific/adventitious binding. Conditions that affect hybridization, and that select against non-specific binding are known in the art.

[0335] The term “homology” is meant DNA sequences that are similar. For example, a “region of homology to a genomic region” is a region of DNA that has a similar sequence to a given “genomic region” in the cell or organism genome. A region of homology can be of any length that is sufficient to promote homologous recombination at the cleaved target site, such that the region of homology has sufficient homology to undergo homologous recombination with the corresponding genomic region. “Sufficient homology” indicates that two polynucleotide sequences have sufficient structural similarity to act as substrates for a homologous recombination reaction or have the same function. The structural similarity includes overall length of each polynucleotide fragment, as well as the sequence similarity of the polynucleotides.

[0336] “Sequence similarity” can be described by the percent sequence identity over the whole length of the sequences, and/or by conserved regions comprising localized similarities such as contiguous nucleotides having 100% sequence identity, and percent sequence identity over a portion of the length of the sequences.

[0337] The amount of sequence identity shared by a target and a donor polynucleotide can vary and includes total lengths and/or regions having unit integral values in the ranges of about 1-20 bp, 20-50 bp, 50-100 bp, 75-150 bp, 100-250 bp, 150-300 bp, 200-400 bp, 250-500 bp, 300-600 bp, 350-750 bp, 400-800 bp, 450-900 bp, 500-1000 bp, 600-1250 bp, 700-1500 bp, 800-1750 bp, 900-2000 bp, 1-2.5 kb, 1.5-3 kb, 2-4 kb, 2.5-5 kb, 3-6 kb, 3.5-7 kb, 4-8 kb, 5-10 kb, or up to and including the total length of the target site. These ranges include every integer within the range. The amount of homology can also be described by percent sequence identity over the full aligned length of the two polynucleotides which includes percent sequence identity (or similarity) of about at least 50%, 55%, 60%, 65%, 70%, 71%, 72%, 73%, 74%, 75%, 76%, 77%, 78%, 79%, 80%, 81%, 82%, 83%, 84%, 85%, 86%, 87%, 88%, 89%, 90%, 91%, 92%, 93%, 94%, 95%, 96%, 97%, 98%, 99% or 100%. Sufficient homology includes any combination of polynucleotide length, global percent sequence identity, and optionally conserved regions of contiguous nucleotides or local percent sequence identity, for example sufficient homology can be described as a region of 75-150 bp having at least 80% sequence identity to a region of the target locus. Sufficient homology can also be described by the predicted ability of two polynucleotides to specifically hybridize under high stringency conditions, see, for example, Sambrook et al., (1989) Molecular Cloning: A Laboratory Manual, (Cold Spring Harbor Laboratory Press, NY); Current Protocols in Molecular Biology, Ausubel et al., Eds (1994) Current Protocols, (Greene Publishing Associates, Inc. and John Wiley & Sons, Inc.); and, Tijssen (1993) Laboratory Techniques in Biochemistry and Molecular Biology-Hybridization with Nucleic Acid Probes, (Elsevier, New York).

[0338] The structural similarity between a given genomic region and the corresponding region of homology (e.g. found on the donor DNA) can be of any degree of sequence identity that allows for homologous recombination to occur. For example, the amount of homology or sequence identity shared by the “region of homology” a corresponding DNA (e.g. of the donor DNA) and the “genomic region” of the organism genome can be at least 50%, 55%, 60%, 65%, 70%, 75%, 80%, 81%, 82%, 83%, 84%, 85%, 86%, 87%, 88%, 89%, 90%, 91%, 92%, 93%, 94%, 95%, 96%, 97%, 98%, 99% or 100% sequence identity, such that the sequences undergo homologous recombination

[0339] As used herein, “homologous recombination” includes the exchange of DNA fragments between two DNA molecules at the sites of homology.

[0340] As used herein, “sequence identity” or “identity” in the context of two nucleic acid or polypeptide sequences makes reference to the residues in the two sequences that are the same when aligned for maximum correspondence over a specified comparison window. When percentage of sequence identity is used in reference to proteins, it is recognized that residue positions which are not identical often differ by conservative amino acid substitutions, where amino acid residues are substituted for other amino acid residues with similar chemical properties (e.g., charge or hydrophobicity) and therefore do not change the functional properties of the molecule. The term further refers hereafter to the amount of characters which match exactly between two different sequences. Hereby, gaps are not counted and the measurement is relational to the shorter of the two sequences.

[0341] It is further within the scope that the terms “similarity” and “identity” additionally refer to local homology, identifying domains that are homologous or similar (in nucleotide and/or amino acid sequence). It is acknowledged that bioinformatics tools such as BLAST, SSEARCH, FASTA, and HMMER calculate local sequence alignments which identify the most similar region between two sequences. For domains that are found in different sequence contexts in different proteins, the alignment should be limited to the homologous domain, since the domain homology is providing the sequence similarity captured in the score. According to some aspects the term similarity or identity further includes a sequence motif, which is a nucleotide or amino-acid sequence pattern that is widespread and has, or is conjectured to have, a biological significance. Proteins may have a sequence motif and/or a structural motif, a motif formed by the three-dimensional arrangement of amino acids which may not be adjacent.

[0342] As used herein, the terms “nucleic acid”, “nucleic acid sequence”, “nucleotide”, “nucleic acid molecule” or “polynucleotide” are intended to include DNA molecules (e.g., cDNA or genomic DNA), RNA molecules (e.g., mRNA), natural occurring, mutated, synthetic DNA or RNA molecules, and analogs of the DNA or RNA generated using nucleotide analogs. It can be single-stranded or double-stranded. Such nucleic acids or polynucleotides include, but are not limited to, coding sequences of structural genes, anti-sense sequences, and non-coding regulatory sequences that do not encode mRNAs or protein products. These terms also encompass a gene. The term “gene”, “allele” or “gene sequence” is used broadly to refer to a DNA nucleic acid associated with a biological function. Thus, genes may include introns and exons as in the genomic sequence, or may comprise only a coding sequence as in cDNAs, and/or may include cDNAs in combination with regulatory sequences. Thus, according to the various aspects of the invention, genomic DNA, cDNA or coding DNA may be used. In one embodiment, the nucleic acid is cDNA or coding DNA.

[0343] The terms “peptide”, “polypeptide” and “protein” are used interchangeably herein and refer to amino acids in a polymeric form of any length, linked together by peptide bonds.

[0344] As used herein, a “genomic region” is a segment of a chromosome in the genome of a cell that is present on either side of the genomic marker (SNP). Such genomic region can comprise at least 5-10, 5-15, 5-20, 5-25, 5-30, 5-35, 5-40, 5-45, 5-50, 5-55, 5-60, 5-65, 5-70, 5-75, 5-80, 5-85, 5-90, 5-95, 5-100, 5-200, 5-300, 5-400, 5-500, 5-600, 5-700, 5-800, 5-900, 5-1000, 5-1100, 5-1200, 5-1300, 5-1400, 5-1500, 5-1600, 5-1700, 5-1800, 5-1900, 5-2000, 5-2100, 5-2200, 5-2300, 5-2400, 5-2500, 5-2600, 5-2700, 5-2800. 5-2900, 5-3000, 5-3100 or more bases and it may have at its two ends primer sequences for amplifying the genomic region. In further aspects, the term “genomic region” used in reference to particular loci/SNP and/or alleles, refers to a chromosomal interval delimited by and encompassing the stated loci/SNP/alleles.

[0345] As used herein, the term “homozygous” refers to a genetic condition or configuration existing when two identical or like alleles reside at a specific locus, but are positioned individually on corresponding pairs of homologous chromosomes in the cell of a diploid organism. In other words, it means a genetic status wherein identical alleles reside at corresponding loci on homologous chromosomes.

[0346] Conversely, as used herein, the term “heterozygous” means a genetic condition or configuration existing when two different or unlike alleles reside at a specific locus, but are positioned individually on corresponding pairs of homologous chromosomes in the cell of a diploid organism. It further means a genetic status wherein different alleles reside at corresponding loci on homologous chromosomes.

[0347] As used herein, the term “genotype” refers to the genetic constitution of an individual (or group of individuals) at one or more genetic loci, as contrasted with the observable and/or detectable and/or manifested trait (the phenotype). Genotype is defined by the allele(s) of one or more known loci that the individual has inherited from its parents. The term genotype can be used to refer to an individual's genetic constitution at a single locus, at multiple loci, or more generally, the term genotype can be used to refer to an individual's genetic make-up for all the genes in its genome. Genotypes can be indirectly characterized, e.g., using markers and/or directly characterized by nucleic acid sequencing. It is also within the scope that the term “genotype” refers to the genetic constitution of a cell or organism. An individual's genotype includes the specific alleles, for one or more genetic marker loci, present in the individual's haplotype. As is known in the art, a genotype can relate to a single locus or to multiple loci, whether the loci are related or unrelated and/or are linked or unlinked. In some embodiments, an individual's genotype relates to one or more genes that are related in that the one or more of the genes are involved in the expression of a phenotype of interest. Thus, in some embodiments a genotype comprises a summary of one or more alleles present within an individual at one or more genetic loci. In some embodiments, a genotype is expressed in terms of a haplotype.

[0348] As used herein, the term “germplasm” refers to the totality of the genotypes of a population or other group of individuals (e.g., a species).

[0349] According to further aspects, the term “germplasm” refers to genetic material of or from an individual (e.g. a mite), a group of individuals (e.g. a mite population or line, species, variety or family), or a clone derived from a line, variety, species, or culture. The germplasm can be part of an organism or cell, or can be separate from the organism or cell. In general, germplasm provides genetic material with a specific molecular makeup that provides a physical foundation for some or all of the hereditary qualities of an organism or cell culture.

[0350] The term “population” or “rearing population”, as used herein, refers to a population that can increase their number by sexual reproduction. A rearing population can comprise alive sexually mature individuals of both sexes and/or other stages of life, for example, eggs and/or nymph from both sexes that can mature into sexually mature adults. Alternatively, a rearing population can comprise one or more fertilized females.

[0351] The term “pest”, as used herein, refers to plant pest, and is understood to include any species, strain or biotype of plant, animal or pathogenic agent injurious for plant or plant products. The pests that can be controlled by the method of the invention are animals that are prey for the predator P. persimilis. In a particular embodiment, the pest is selected from the group consisting of Tetranychidae mites, Thrips, whiteflies, aphids and moths.

[0352] A “haplotype” is the genotype of an individual at a plurality of genetic loci, i.e., a combination of alleles. Typically, the genetic loci that define a haplotype are physically and genetically linked, i.e., on the same chromosome segment. The term “haplotype” can refer to polymorphisms at a particular locus, such as a single marker locus, or polymorphisms at multiple loci along a chromosomal segment. It is also within the scope of the present invention that the term “haplotype” (haploid genotype) refers to a group of alleles in an organism that are inherited together from a single parent. In other aspects of the invention it is used to mean a set of linked DNA sequences, such as Single-Nucleotide Polymorphism (SNP) alleles, indels, that tend to occur together (i.e., that are associated statistically). According to further aspects of the invention, it refers to a collection of specific mutations within a given genetic segment.

[0353] The term haplotype further means a set of DNA variations, or polymorphisms, that tend to be inherited together. A haplotype can refer to a combination of alleles or to a set of Single Nucleotide Polymorphisms (SNPs) or other genetic variations found on the same chromosome.

[0354] According to some embodiments, the P. persimilis haplotype of the present invention is associated with the characteristic of improved rearing on a non-Tetranychid arthropod prey as compared to P. persimilis lacking the haplotype, which characterizes naturally occurring P. persimilis populations and/or P. persimilis predatory mites traditionally or conventionally reared on Tetranychid prey species (e.g. spider mites).

[0355] The term “allele(s)” used herein means any of one or more alternative or variant forms of a gene or a genetic unit at a particular locus, all of which alleles relate to one trait or characteristic at a specific locus. It further means one of two or more different nucleotides or nucleotide sequences that occur at a specific locus. In a diploid cell of an organism, alleles of a given gene are located at a specific location, or locus (loci in plural) on a chromosome. One allele is present on each chromosome of the pair of homologous chromosomes. Such alternative or variant forms of alleles may be the result of single nucleotide polymorphisms, insertions, indels, inversions, translocations or deletions, or the consequence of gene regulation caused by, for example, chemical or structural modification, transcription regulation or post-translational modification/regulation. An allele associated with a qualitative trait may comprise alternative or variant forms of various genetic units including those that are identical or associated with a single gene or multiple genes or their products or even a gene disrupting or controlled by a genetic factor contributing to the phenotype represented by the locus.

[0356] As used herein, the terms “desired allele”, “favorable allele” and “allele of interest” are used interchangeably to refer to an allele associated with a desired trait (e.g. improved rearing properties on a non-Tetranychid arthropod prey). As used herein, the term “locus” means a specific place or places or region or a site on a chromosome where for example a gene or genetic marker element or factor is found. In specific embodiments, such a genetic element is contributing to a trait A “locus” is a position on a chromosome where a gene or marker or allele is located. In some embodiments, a locus may encompass one or more nucleotides.

[0357] The term “cultivar” or “strain” used herein means a group of similar mite individuals that by features (e.g. genetic features and performance) can be identified from other strains within the same species e.g. identified from the natural existing strain. A cultivated mite or mite population or line refers hereafter to a modified mite individual or plurality of individuals or a population, e.g. subjected to a breeding and selection processes and/or comprising genetic sequences that differentiate them from the natural or existing corresponding mite populations or individuals that were not subjected to the breeding and selection processes and to the artificial growth conditions.

[0358] The term “genetic background” used herein refers to any inbreeding group, including taxonomic subgroups such as subspecies, taxonomically subordinate to species and superordinate to a race or subrace and marked by a pre-determined profile of latent factors of hereditary traits.

[0359] As used herein, the term “breeding” and grammatical variants thereof, refer to any process that generates a progeny individual. Breeding can be sexual or asexual, or any combination thereof. Exemplary non-limiting types of breeding include crossing, introgressing, selfing, backcrossing, doubled haploid derivative generation, and combinations thereof.

[0360] The term “genetic determinant” as used herein refers to genetic determinants such as genes, alleles, genetic loci, QTLs or traits.

[0361] Introgression of a genetic determinant means the incorporation of genes, alleles, genetic loci, QTLs or traits into a line wherein essentially all of the desired morphological and physiological characteristics of the line are recovered, in addition to the genetically introgressed determinant. Such a process is often used in cultivar/line/species/variety development, in which one or a few genetic determinants are transferred to a desired genetic background, preferably by using backcrossing.

[0362] In further aspects of the present invention, the term introgression or breeding refers to the transmission of a desired allele or genomic region or combination of desired alleles of a genetic locus or genetic loci from one genetic background to another. For example, a desired allele at a specified locus can be transmitted to at least one progeny via a sexual cross between two parents of the same species, where at least one of the parents has the desired allele in its genome. Alternatively, for example, transmission of an allele can occur by recombination between two donor genomes, where at least one of the donors has the desired allele in its genome. The desired allele may be a selected allele of a marker, a QTL, a transgene, or the like. Offspring comprising the desired allele can be repeatedly backcrossed to a line having a desired genetic background and selected for the desired allele, with the result being that the desired allele becomes fixed in the desired genetic background. For example, a marker associated with enhanced rearing on a non-Tetranychid arthropod prey (e.g. enhanced development and reproduction) may be introgressed from a donor into a recurrent parent that lacks this characteristic. The resulting offspring could then be repeatedly backcrossed and selected until the progeny possess the desired allele(s) in the recurrent parent background.

[0363] As used herein, the term “co-segregate” is understood within the scope of the invention to refer to the tendency for genes, traits and/or genetic markers or genetic variants to segregate, to be in coupling phase, or to be inherited together. Alternatively, two or more genes, gene alleles or genetic markers that are linked on the same chromosome are transmitted to the same daughter cell leading to the inheritance by the offspring of these genes or alleles together.

[0364] According to one embodiments, the genomic haplotype is associated or in coupling phase with the characteristic of improved rearing properties on a non-Tetranychid arthropod as a factitious host, preferably on an immobilized non-Tetranychid arthropod prey, such as on an Astigmatid prey, most preferably on an immobilized Astigmatid prey.

[0365] According to one aspect, the improved reproduction is characterized by a daily reproduction rate (λ) of above 1.06, preferably in the range of 1.10-1.40, such as 1.15-1.40, 1.20-1.40, 1.25-1.40, 1.30-1.40, or 1.10-1.35, 1.10-1.30, 1.10-1.25, 1.10-1.20, while preying on a non-Tetranychid arthropod as a food source, preferably on an immobilized non-Tetranychid arthropod prey, such as on an Astigmatid prey, most preferably on an immobilized Astigmatid prey.

[0366] The term “fungus reducing agent” or “fungal reducing agent” refers hereafter to chemical fungus reducing agents such as a natural or synthetic fungicide, or to a biological fungus reducing agent such as a population of a mite species producing antifungal exudates, or a population of mycophagous mites, in particular selected from the Astigmata, for example populations of living Carpoglyphus lactis or Lepidoglyphus destructor individuals. Such fungus reducing mite populations are disclosed in WO2013/103294.

[0367] It is within the scope of the current invention that the rearing composition as defined in any of the above is absent of or is lacking a fungus reducing agent. The claimed Phytoseiulus mite population of the present invention is characterized in that at least 5% of said P. persimilis individuals comprise within their genome at least one Single Nucleotide Polymorphism (SNP) marker selected from:
[0368] a. SNP at position 34739 of SEQ ID NO:84 or a variant, portion or complementary sequence thereof,
[0369] b. at least one SNP at a position selected from 105452, 109775, 115020, 115073, 125940, 131548 and 131555, of SEQ ID NO:85 or a variant, portion or complementary sequence thereof,
[0370] c. at least one SNP at a position selected from 99333, 99595, 99605, 115325 and 115354, of SEQ ID NO:86 or a variant, portion or complementary sequence thereof,
[0371] d. at least one SNP at a position selected from 4508, 11697, 12229, 13135, 32979, 38081, 38220, of SEQ ID NO:87 or a variant, portion or complementary sequence thereof,
[0372] e. at least one SNP at a position selected from 30913, 34950, 38409, 38458, 42427, 42604 and 43158 of SEQ ID NO:88 or a variant, portion or complementary sequence thereof,
[0373] f. SNP at position 1032 of SEQ ID NO:89 or a variant, portion or complementary sequence thereof,
[0374] g. SNP at position 173977 and/or SNP at position 228195 of SEQ ID NO:90 or a variant, portion or complementary sequence thereof, and
[0375] h. at least one SNP at a position selected from 857, 15689, 40135 and 49492 of SEQ ID NO:91 or a variant, portion or complementary sequence thereof.

[0376] In such a population at least 5% of the individuals are capable of completing their life cycle and reproducing for at least 2 generations when fed on immobilized Astigmata individuals including mites at any developmental stage and/or eggs. It is noted that non-viable Astigmata mite developmental stages are incapable of producing or secreting a fungus reducing agent.

[0377] Such a population may be further characterized by the following embodiments:

[0378] According to one embodiment, rearing by an alternative method for rearing P. persimilis and other mite species of the genus Phytoseiulus. The mite species of the genus Phytoseiulus, e.g. P. persimilis is shown to broaden its dietary range, and be reared on other preys, which are cheaper to produce and therefore much more desirable. The alternative prey mites are mostly Astigmatic mites that feed on stored products and are therefore significantly cheaper to produce.

[0379] According to a further embodiment, a system and method for using mites (especially dead or otherwise immobilized mites) of the species Carpoglyphus lactis (Cl) or other Astigmatic mite as an alternative food for mite species of the Phytoseiulus genus, such as Phytoseiulus persimilis, is provided.

[0380] According to a further embodiment, it is shown by the present invention that mite species Phytoseiulus persimilis comprising the genetic markers of the present invention can complete its life cycle and reproduce when feeding on dead mites belonging to the order Astigmata (within the Arachnida class).

[0381] It is further within the scope to develop a system for the production of mite species of the genus Phytoseiulus, e.g. Phytoseiulus persimilis, comprising the genetic markers of the present invention, on a diet comprising Astigmatic mites. The system is based on the following components:
[0382] 1. The predator—specifically Phytoseiulus persimilis and more generally mites of the genus Phytoseiulus.
[0383] 2. The prey—a mite species, possibly Carpoglyphus lactis, Glyciphagus domesticus, Lepidoglyphus destructor, Dermatophagoides farinae, Dermatophagoides pteronisinus or other Astigmatic mite, or other mite species such as Amblyseius swirskii.
[0384] 3. The rearing system—the specific setup in which the mites are reared, comprising the rearing media, the way the prey mite is presented to the predator, the prey developmental stage and other factors.

[0385] The following rearing methods are within the scope of the present invention:
[0386] 1. The predator is reared on a living mixture of prey mites.
[0387] 2. The predator receives a mixture of immobilized prey mites by means of freezing or by other means such as irradiation.
[0388] 3. A certain developmental stage of the prey mite is extracted from the prey mite's population, and then served alive or dead as food to the predator.

[0389] It is noted that in all of the above optional rearing methods, the prey mite could be either the above mentioned Astigmatic mites, or other species.

[0390] With respect to the final biological control product, the following is within the scope of the present invention:
[0391] 1. A mixture which contains both the predator and the prey mites, or the predator and specific stages of the prey mites used for feeding the predator.
[0392] 2. A further option is extracting only the predators, so that the final product contains only the predators.

[0393] According to one embodiment, the present invention provides a biological control composition comprising a cultivated rearing population of Phytoseiulus persimilis (P. persimilis) predatory mite individuals, and optionally a carrier material, wherein at least 5% of said P. persimilis individuals comprise within their genome at least one Single Nucleotide Polymorphism (SNP) marker selected from:
[0394] a. SNP at position 34739 of SEQ ID NO:84 or a variant, portion or complementary sequence thereof,
[0395] b. at least one SNP at a position selected from 105452, 109775, 115020, 115073, 125940, 131548 and 131555, of SEQ ID NO:85 or a variant, portion or complementary sequence thereof,
[0396] c. at least one SNP at a position selected from 99333, 99595, 99605, 115325 and 115354, of SEQ ID NO:86 or a variant, portion or complementary sequence thereof,
[0397] d. at least one SNP at a position selected from 4508, 11697, 12229, 13135, 32979, 38081, 38220, of SEQ ID NO:87 or a variant, portion or complementary sequence thereof,
[0398] e. at least one SNP at a position selected from 30913, 34950, 38409, 38458, 42427, 42604 and 43158 of SEQ ID NO:88 or a variant, portion or complementary sequence thereof,
[0399] f. SNP at position 1032 of SEQ ID NO:89 or a variant, portion or complementary sequence thereof,
[0400] g. SNP at position 173977 and/or SNP at position 228195 of SEQ ID NO:90 or a variant, portion or complementary sequence thereof, and at least one SNP at a position selected from 857, 15689, 40135 and 49492 of SEQ ID NO:91 or a variant, portion or complementary sequence thereof.

[0401] According to a further aspect, the present invention provides a predatory mite population comprising Phytoseiulus predatory individuals (preferably comprising any of the herein disclosed genetic markers or any combination thereof), wherein the population is characterized by a daily oviposition rate of at least 0.55, such as ≥0.60, ≥0.65, ≥0.70, ≥0.75, ≥0.80, ≥0.90, ≥0.95, ≥1.00, ≥1.05, ≥1.10, ≥1.15, ≥1.20, ≥1.25, ≥1.30, ≥1.35, ≥1.40, ≥1.45, ≥1.50, ≥1.55, ≥1.60, ≥1.65, ≥1.70, ≥1.75, ≥1.80, ≥1.85, ≥1.90, ≥1.95, or ≥2.00 eggs/day/female while preying on non-Tetranychid arthropod prey. This aspect of the invention includes embodiments wherein the percentage of female individuals capable of reproduction on a non-Tetranychid arthropod prey is not specified (is unspecified).

[0402] According to yet a further aspect, the invention relates to a biological control composition wherein the composition comprises:
[0403] a. a predatory mite population comprising individuals of at least one mite species of the genus Phytoseiulus (preferably comprising any of the herein disclosed genetic markers or any combination thereof) capable of development and reproduction on a non-Tetranychid arthropod prey, preferably on an immobilized non-Tetranychid arthropod prey, such as on a non-phytophagous prey, preferably on an Astigmatid prey, most preferably on an immobilized Astigmatid prey, such as an immobilized Astigmatid prey, in particular a Carpoglyhus prey, having immobilized life stages comprising immobilized eggs; and
[0404] b. a prey mite population comprising individuals of a non-Tetranychid arthropod prey, preferably an immobilized non-Tetranychid arthropod prey, such as a non-phytophagous prey, preferably an Astigmatid prey, most preferably an immobilized Astigmatid prey, such as an immobilized Astigmatid prey, in particular a Carpoglyhus prey, having immobilized life stages comprising immobilized eggs, and
[0405] c. optionally a carrier, such as a carrier material selected from sawdust, wheat bran, buckwheat husks, rice husks or millet husks, or comprising a mixture thereof, preferably a carrier having carrier elements comprising mite shelters and/or comprising surfaces to which mites can adhere to. A non-Tetranychid arthropod prey according to the present invention is a prey selected from arthropods other than Tetranychids. The non-Tetranychid arthropod prey may be a non-phytophagous prey, preferably an Astigmatid prey. In the present invention most preferably, an immobilized Astigmatid prey is used as the non-Tetranychid arthropod prey, in particular an immobilized Astigmatid prey having immobilized life stages comprising immobilized eggs.

[0406] A further aspect of the invention relates to a biological control composition comprising Phytoseiulus predatory individuals (preferably comprising any of the herein disclosed genetic markers or any combination thereof), wherein the population is characterized by a daily oviposition rate of at least 0.50, such as ≥0.55, ≥0.60, ≥0.65, ≥0.70, ≥0.75, ≥0.80, ≥0.90, ≥0.95, ≥1.00, ≥1.05, ≥1.10, ≥1.15, ≥1.20, ≥1.25, ≥1.30, ≥1.35, ≥1.40, ≥1.45, ≥1.50, ≥1.55, ≥1.60, ≥1.65, ≥1.70, ≥1.75, ≥1.80, ≥1.85, ≥1.90, ≥1.95, or at least 2.00 eggs/day/female while preying on non-Tetranychid arthropod prey, preferably on an immobilized non-Tetranychid arthropod prey, such as on a non-phytophagous prey, preferably on an Astigmatid prey, most preferably on an immobilized Astigmatid prey, such as an immobilized Astigmatid prey, in particular a Carpoglyphus prey, having immobilized life stages comprising immobilized eggs.

[0407] According to a further aspect, the invention relates to a biological control composition comprising Phytoseiulus predatory individuals (preferably comprising any of the herein disclosed genetic markers or any combination thereof), wherein the population is characterized by improved reproduction on non-Tetranychid arthropod prey, preferably on an immobilized non-Tetranychid arthropod prey, such as on a non-phytophagous prey, preferably on an Astigmatid prey, most preferably on an immobilized Astigmatid prey, such as an immobilized Astigmatid prey, in particular a Carpoglyphus prey, having immobilized life stages comprising immobilized eggs. The improved reproduction on non-Tetranychid arthropod prey is as compared to a control Phytoseiulus predatory population of the same species which lacks the genetic markers, traditionally reared on the P. persimilis natural host (spider mites).

[0408] According to certain embodiments of the different aspects of the invention, female individuals (preferably comprising any of the herein disclosed genetic markers or any combination thereof) capable of development and reproduction on the non-Tetranychid arthropod prey, are female individuals capable of oviposition on non-Tetranychid arthropod prey, preferably on immobilized Astigmatid prey having immobilized life stages comprising immobilized eggs. As the skilled person will understand, oviposition capability relates to the capability to lay or produce eggs. Determining oviposition rates is within the ambit of the skill of the skilled person. The oviposition capability of the females preferably is determined after being fed for at least 4 days on the non-Tetranychid prey, such as after 5 days or after 6 days.

[0409] The daily oviposition rate of a predatory mite population (preferably comprising any of the herein disclosed genetic markers or any combination thereof) according to various aspects of the invention may be at least 0.50, such as ≥0.55, ≥0.60, ≥0.65, ≥0.70, ≥0.75, ≥0.80, ≥0.90, ≥0.95, ≥1.00, ≥1.05, ≥1.10, ≥1.15, ≥1.20, ≥1.25, ≥1.30, ≥1.35, ≥1.40, ≥1.45, ≥1.50, ≥1.55, ≥1.60, ≥1.65, ≥1.70, ≥1.75, ≥1.80, ≥1.85, ≥1.90, ≥1.95, or at least 2.00 eggs/day/female.

[0410] In some embodiments, the daily oviposition rate is at least 1 egg per day per female, particularly at least 1.4 eggs/day/female, more particularly between 1.4-2 eggs/day/female. In main aspects of the present invention, a daily oviposition rate of at least 1 egg per day per female, particularly at least 1.4 eggs/day/female, more particularly between 1.4-2 eggs/day/female, is achieved when using the non-Tetranychid arthropod prey as the sole food source for the Phytoseiulus predatory individuals (preferably comprising any of the herein disclosed genetic markers or any combination thereof). According to further aspects of the present invention, a daily oviposition rate of at least 1 egg per day per female, particularly at least 1.4 eggs/day/female, more particularly between 1.4-2 eggs/day/female, is achieved when using the non-Tetranychid arthropod prey as a food source for the Phytoseiulus predatory individuals in alternation with spider mites diet.

[0411] Within the present invention the term “at least” in the context of numerical values is considered equivalent with the meaning of the mathematical sign “≥”. The skilled person will understand that, being an average value for (the female part of) the population, the oviposition rate or egg production rate may have a fractional value not corresponding to whole eggs. The skilled person will also understand that a mite population having a daily oviposition rate of at least 0.50 eggs/day/female is capable to produce 0.5 eggs/day/female or more. Thus defined differently, a predatory mite population having a daily oviposition rate of ≥0.55, ≥0.60, ≥0.65, ≥0.70, ≥0.75, ≥0.80, ≥0.90, ≥0.95, ≥1.00, ≥1.05, ≥1.10, ≥1.15, ≥1.20, ≥1.25, ≥1.30, ≥1.35, ≥1.40, ≥1.45, ≥1.50, ≥1.55, ≥1.60, ≥1.65, ≥1.70, ≥1.75, ≥1.80, ≥1.85, ≥1.90, ≥1.95, or ≥2.00 eggs/day/female is capable of producing respectively 0.55, 0.60, 0.65, 0.70, 0.75, 0.80, 0.90, 0.95, 1.00, 1.05, 1.10, 1.15, 1.20, 1.25, 1.30, 1.35, 1.40, 1.45, 1.50, 1.55, 1.60, 1.65, 1.70, 1.75, 1.80, 1.85, 1.90, 1.95, 2.00 eggs/day/female. Again, if more eggs then the indicated numbers are produced, the indicated number of eggs are produced.

[0412] The daily oviposition rate of a predatory mite population (preferably comprising any of the herein disclosed genetic markers or any combination thereof) according to other embodiments of the different aspects of the invention may be at least 0.50, such as ≥0.55, ≥0.60, ≥0.65, ≥0.70, ≥0.75, ≥0.80, ≥0.90, ≥0.95, ≥1.00, ≥1.05, ≥1.10, ≥1.15, ≥1.20, ≥1.25, ≥1.30, ≥1.35, ≥1.40, ≥1.45, ≥1.50, ≥1.55, ≥1.60, ≥1.65, ≥1.70, ≥1.75, ≥1.80, ≥1.85, ≥1.90, ≥1.95, or at least 2.00 eggs/day/female, when using the non-Tetranychid arthropod prey as the sole food source or alternatively when preying on the non-Tetranychid arthropod prey. Also in this case, defined differently, a predatory mite population having a daily oviposition rate of ≥0.55, ≥0.60, ≥0.65, ≥0.70, ≥0.75, ≥0.80, ≥0.90, ≥0.95, ≥1.00, ≥1.05, ≥1.10, ≥1.15, ≥1.20, ≥1.25, ≥1.30, ≥1.35, ≥1.40, ≥1.45, ≥1.50, ≥1.55, ≥1.60, ≥1.65, ≥1.70, ≥1.75, ≥1.80, ≥1.85, ≥1.90, ≥1.95, or ≥2.00 eggs/day/female is capable of producing respectively 0.55, 0.60, 0.65, 0.70, 0.75, 0.80, 0.90, 0.95, 1.00, 1.05, 1.10, 1.15, 1.20, 1.25, 1.30, 1.35, 1.40, 1.45, 1.50, 1.55, 1.60, 1.65, 1.70, 1.75, 1.80, 1.85, 1.90, 1.95, 2.00 eggs/day/female when using the non-Tetranychid arthropod prey as the sole food source. When using the non-Tetranychid prey as the sole food source no other food is presented to the individuals of the predatory mite population. As stated before, if more eggs then the indicated numbers are produced, the indicated number of eggs are produced.

[0413] Capability to reproduce on non-Tetranychid arthropod prey according to certain embodiments of different aspects of the invention most preferably includes the capability of completing a full ontogenetic cycle, when using the non-Tetranychid arthropod prey as the sole food source. Completion of the ontogenic cycle, as the skilled person will understand is the capability of individuals to develop from the earlies life stage to a subsequent earlies life stage in a second generation, viz. for predatory mites development from a (parent) egg to an (offspring) egg in a next generation or defined differently development from an egg to a sexually mature female individual producing a number of eggs. The skilled person will know and understand that for many predatory mite species, including Phytoseiulus species, copulation with a male individual is required for egg production in females. If a population is capable to complete the ontogentic cycle on a certain food source, it can in theory perpetually cycle through multiple generations on that food source.

[0414] Capability to develop and reproduce on non-Tetranychid arthropod prey according to certain embodiments of different aspects of the invention, is characterized by capability of female individuals to produce female offspring in a number of subsequent generations. The number of subsequent generations is at least 1, such as at least 2, such as in at least 3, 4, 5, 6, 7, 8, 9 at least 10 generations. The skilled person will understand that in case the number of subsequent generations, is at least 2, a full ontogenetic cycle is completed, as the female offspring of the female has produced (female) offspring. Thus the number of subsequent generations preferably is at least 2, such that at least one ontogentic cycle is completed.

[0415] Capability to develop and reproduce on non-Tetranychid arthropod prey according to certain embodiments of different aspects of the invention may also include a juvenile and/or female survival rate of at least 40%, on the non-Tetranychid prey used as the sole food source. As the skilled person will understand, the juvenile survival rate is the percentage of juvenile life stages that is capable of developing to the adult stage. Juvenile survival rates in the context of the present invention are determined as the percentage post embryonic (post-egg) stages that reach adulthood. The juvenile survival rate is determined on the non-Tetranychid prey, preferably an immobilized Astigmatid prey having immobilized life stages comprising immobilized eggs, used as the sole food source. Juvenile survival is determined over a period of between 3 to 7 days, such as over a period of 2, 3, 4, 5, 6, or 7 days, most preferably during a period of 3 days. The female survival rate is the rate of mature females that survive on the non-Tetranychid prey, preferably an immobilized Astigmatid prey having immobilized life stages comprising immobilized eggs, when used as the sole food source. Female survival is determined over a period of 7 days. At least 40% for the juvenile survival rate may be between 40% and 95%, such as 45%-90%, 50%-90%, 55-90%, 60%-90%, 65%-90%, 70%-90%, 75%-90%, 45%-85%, 50%-85%, 55-85%, 60%-85%, 65%-85%, 70%-85%, 75%-85%. At least 40% for the female survival rate may be at least 45%, at least 50%, at least 55%, at least 60%, at least 65%, at least 70%, at least 75%, at least 80%, at least 85%, at least 90%, at least 95%, at least 99%. At least 40% and all higher percentages mentioned, include substantially all and 100%.

[0416] In some embodiments, the juvenile and/or female survival rate is at least 60%, particularly at least 80% and up to 100%. In main aspects of the present invention, a juvenile and/or female survival rate of at least 60%, particularly at least 80% and up to 100%, is achieved when using the non-Tetranychid arthropod prey as the sole food source for the Phytoseiulus predatory individuals (preferably comprising any of the herein disclosed genetic markers or any combination thereof). According to further aspects of the present invention, a juvenile and/or female survival rate of at least 60%, particularly at least 80% and up to 100%, is achieved when using the non-Tetranychid arthropod prey as a food source for the Phytoseiulus predatory individuals in alternation with spider mites diet.

[0417] Capability to reproduce on non-Tetranychid arthropod prey according to certain embodiments of different aspects of the invention may also be characterized by a daily multiplication (or reproduction) rate λ in the range of about 1.10-1.40, such as 1.15-1.40, 1.20-1.40, 1.25-1.40, 1.30-1.40, or 1.10-1.35, 1.10-1.30, 1.10-1.25, 1.10-1.20. The skilled person will understand that for values for λ above 1.0 the population increases, thus there is reproduction. The skilled person will further understand that due to starvation in a population, also under the circumstance that values for λ for a given population are somewhat below 1.0, individuals in the population may be reproducing (to a level that is not compensating for the level of mortality due to starvation). The daily multiplication rate according to preferred embodiments relates to daily multiplication rates when using the non-Tetranychid arthropod prey as the sole food source. Although daily multiplication (or reproduction) rates above 1.0 have been observed by the inventors of the present invention for Phytoseiulus populations reared on spider mites and not comprising the at least one genetic marker of the present invention, these Phytoseiulus populations do not have daily multiplication (or reproduction) rates of 1.10 or above.

[0418] In some embodiments, the daily multiplication (or reproduction) rate λ is at least 1.15, particularly at least 1.2, more particularly 1.2-1.4. In main aspects of the present invention, a daily multiplication (or reproduction) rate λ of at least 1.15, particularly at least 1.2, more particularly 1.2-1.4, is achieved when using the non-Tetranychid arthropod prey as the sole food source for the Phytoseiulus predatory individuals (preferably comprising any of the herein disclosed genetic markers or any combination thereof). According to further aspects of the present invention, a daily multiplication (or reproduction) rate λ of at least 1.15, particularly at least 1.2, more particularly 1.2-1.4, is achieved when using the non-Tetranychid arthropod prey as a food source for the Phytoseiulus predatory individuals (preferably comprising any of the herein disclosed genetic markers or any combination thereof) in alternation with spider mites diet.

[0419] In general, within the context of the present invention, life stages parameters, such as oviposition rates and survival rates, completion of the ontogentic cycle and population growth rates of predatory mites may be determined at 22 degrees Celsius and 85% relative humidity, while food (the non-Tetranychid arthropod prey) is not limiting (presented ad libidum).

[0420] According to preferred embodiments of the predatory mite population of the invention (preferably comprising any of the herein disclosed genetic markers or any combination thereof), predatory individuals have predatory behavior towards individuals of a Tetranychid species. Preferably, female individuals have predatory behavior towards Tetranychid individuals. If in the population at least 10% of the female individuals is capable of development and reproduction a non-Tetranychid arthropod prey, most preferably this at least 10% of the female individuals exhibit predatory behavior towards individuals of a Tetranychid species. By maintaining predatory behavior towards individuals of a Tetranychid species, the predatory mite individuals can be used as biocontrol agents against the Tetranychid species on which they predate. According to preferred embodiments, the predatory behavior towards individuals of a Tetranychid species may result in a daily oviposition rate of at least 10, preferably at least 15, more preferably at least 19 eggs per female per 5 days.

[0421] According to some embodiments of the present invention, the above described predatory behavior towards individuals of a Tetranychid species is achieved when using the non-Tetranychid arthropod prey as the sole food source for the reared Phytoseiulus predatory individuals (preferably comprising any of the herein disclosed genetic markers or any combination thereof). According to further aspects of the present invention the above described predatory behavior towards individuals of a Tetranychid species, is achieved when using the non-Tetranychid arthropod prey as a food source for the reared Phytoseiulus predatory individuals (preferably comprising any of the herein disclosed genetic markers or any combination thereof) in alternation with spider mites diet.

[0422] According to one embodiment of the different aspects of the invention, the invention provides a rearing composition comprising: a predatory mite population (preferably comprising any of the herein disclosed genetic markers or any combination thereof) comprising at least one mite species of the genus Phytoseiulus, and a prey mite population comprising individuals of at least one mite species from the order Astigmata, wherein said predatory mite population is capable of oviposition for at least 2 generations, further wherein said Astigmata prey is selected from the group consisting of immobilized mites, preferably non-viable mites, non-hatching (immobilized) eggs, preferably non-viable eggs and a combination thereof.

[0423] It is within the scope of the present invention that the predatory mite (preferably comprising any of the herein disclosed genetic markers or any combination thereof) is capable of oviposition for at least 10 generations and preferably more, having the Astigmata individuals as a prey.

[0424] It is further within the scope that the predatory mite population (preferably comprising any one of the herein disclosed genetic markers or any combination thereof) exhibits an increased reproduction rate trait, in particular when using Astigmatid mites as food source, as compared to a control predatory mite population, of the same species, lacking the aforementioned trait.

[0425] It is further within the scope that the predatory mite population of the present invention (preferably comprising any one of the herein disclosed genetic markers or any combination thereof) exhibits a daily reproduction rate in the range of about 1.15-1.2, in particular when using Astigmatid mites as food source.

[0426] It is further within the scope of the present invention that the predatory mite population (preferably comprising any one of the herein disclosed genetic markers or any combination thereof) is characterized by a beige-white color, when said Phytoseiulus predatory mite is reared upon said Astigmata prey as a food source.

[0427] It is within the scope of the present invention that the predators (preferably comprising any one of the herein disclosed genetic markers or any combination thereof) would have a different appearance than that of the common product containing P. persimilis mites reared on spider mites (white mites in the case of the present invention instead of the usual orange).

[0428] According to a further embodiment, the present invention shows that a population of P. persimilis comprising any one of the herein disclosed genetic markers or any combination thereof, successfully developed and reproduced on dead Carpoglyphus lactis for at least six months (about 25 generations).

[0429] It is emphasized that P. persimilis (preferably comprising any one of the herein disclosed genetic markers or any combination thereof) is herein surprisingly reported to complete its life cycle and reproduce on either non-phytophagous prey (prey that doesn't require to feed on living plants), or prey that doesn't consume phytophagous mites.

[0430] The present invention provides a mite composition which contains a Phytoseiulus persimilis rearing mite population (preferably comprising any one of the herein disclosed genetic markers or any combination thereof), and a factitious host mite population comprising at least one species from the order Astigmata or from the family Phytoseiidae.

[0431] The present invention solves the serious problem of rearing the main spider-mite controlling predator, Phytoseiulus persimilis, by rearing it in a cost effective and efficient way on a non-phytophagous alternative diet.

[0432] Accordingly, the invention provides a mite composition comprising: a rearing population of mite species of the genus Phytoseiulus, for example Phytoseiulus persimilis predatory mite species (preferably comprising any one of the herein disclosed genetic markers or any combination thereof), a population of at least one species from the order Astigmata or from the family Phytoseiidae, and optionally a carrier.

[0433] According to one embodiment of the different aspects, the present invention provides a rearing composition comprising: predatory mite population comprising at least one mite species of the genus Phytoseiulus (preferably comprising any one of the herein disclosed genetic markers or any combination thereof), and a prey mite population comprising at least one species from the order Astigmata.

[0434] According to a further embodiment of the different aspects, the present invention provides a method for rearing predatory mite population comprising at least one mite species of the genus Phytoseiulus (preferably comprising any one of the herein disclosed genetic markers or any combination thereof), the method comprising: (a) providing a composition comprising a predatory mite population comprising at least one mite species of the genus Phytoseiulus, and a prey mite population comprising at least one species from the order Astigmata; and (b) allowing individuals of the predatory mite population to prey on individuals of the Astigmatid population.

[0435] According to a further embodiment of the different aspects, the present invention provides a rearing composition comprising: predatory mite population comprising at least one mite species of the genus Phytoseiulus (preferably comprising any one of the herein disclosed genetic markers or any combination thereof), and a prey mite population comprising at least one species from the Phytoseiidae family.

[0436] According to a further embodiment of the different aspects, the present invention provides a method for rearing predatory mite population comprising at least one mite species of the genus Phytoseiulus (preferably comprising any one of the herein disclosed genetic markers or any combination thereof), the method comprising: (a) providing a composition comprising: predatory mite population comprising at least one mite species of the genus Phytoseiulus, and a prey mite population comprising at least one species from the Phytoseiidae family; and (b) allowing individuals of the predatory mite population to prey on individuals of the Phytoseiidae family population.

[0437] In some embodiments of the different aspects, the prey population i.e. species from the order Astigmata or species from the Phytoseiidae family, is immobilized and/or not alive.

[0438] It is further within the scope of the different aspects that the Phytoseiulus persimilis predatory mite (preferably comprising any one of the herein disclosed genetic markers or any combination thereof) is capable of reproducing for at least 2 generations, preferably at least 10 generations, more preferably for at least 15 generations or more generations, feeding on the aforementioned Astigmata or Phytoseiid population, in particular an immobilized population.

[0439] The composition of the present invention provides a considerable number of advantages over previous combinations. In one aspect, the food material used to feed the prey during predator production will no longer be plants or phytophagous mites, but mites that live upon stored products, therefore providing a substantial cost saving.

[0440] In another aspect, the present invention provides a rearing composition comprising: predatory mite population comprising at least one mite species of the genus Phytoseiulus (preferably comprising any one of the herein disclosed genetic markers or any combination thereof), and a prey mite population comprising at least one species from the Phytoseiidae family.

[0441] According to yet further embodiments of the different aspects of the present invention, the prey mite species is of the genus Amblyseius, e.g. Amblyseius swirskii.

[0442] According to further embodiments of the different aspects of the present invention, the rearing composition comprises immobilized prey mites.

[0443] According to further aspects of the present invention, the prey mites are immobilized or dead mites.

[0444] According to further aspects, the present invention provides a method for controlling a crop pest, the method comprising applying a composition as defined in any of the above to a field crop.

[0445] According to further aspects, the present invention provides use of the composition as defined in any of the above for controlling a crop pest.

[0446] According to further aspects, the present invention provides a biological control product for controlling crop pests comprising a mixture of (a) Phytoseiulus persimilis predatory mite individuals species from the Phytoseiidae family (preferably comprising any one of the herein disclosed genetic markers or any combination thereof) raised by the composition as defined in any of the above, (b) prey mite individuals comprising at least one species from the order Astigmata, and (c) optionally a carrier material.

[0447] The present invention further provides a slow release system (e.g. sachet) for mites, especially for mite species of the genus Phytoseiulus, particularly Phytoseiulus persimilis (P. persimilis) (preferably comprising any one of the herein disclosed genetic markers or any combination thereof) configured to be applied on a crop.

[0448] A core aspect of the innovative solution is that the predatory mites (preferably comprising any one of the herein disclosed genetic markers or any combination thereof) can reproduce within the system for several generations, while a certain proportion of the predatory mites continuously leaves the system and reaches the crop to control pests. This provides a continuous supply of mites to the crop without the need to apply them repeatedly by the farmer.

[0449] Embodiments of the slow release system provided by the present invention are based upon the following features:
[0450] 1. Predatory mite individuals—P. persimilis or other mite species of the Phytoseiulus genus (preferably comprising any one of the herein disclosed genetic markers or any combination thereof).
[0451] 2. Food source for the predatory mites—a factitious prey or host for example, frozen eggs of Carpoglyphus lactis (C. lactis) or another astigmatic mite.

[0452] The predatory mites are combined with their factitious host at the same physical location.

[0453] This is done by the following alternative approaches:
[0454] a. Providing the predatory mites (preferably comprising any one of the herein disclosed genetic markers or any combination thereof) with their factitious host in a container such as a sachet, packet, pouch, pocket, sack or a bag configured to be hung on the crop plant, from which the mites would slowly and continuously be released to the crop during a period of about three weeks.
[0455] b. Applying a mixture containing the predatory mites (preferably comprising any one of the herein disclosed genetic markers or any combination thereof), a carrier and the factitious host as a food source, directly on the crop leaves. From this mixture, the predatory mites would disperse in the crop.

[0456] It is noted that such slow release systems for predatory mites are highly desirable for P. persimilis since, P. persimilis was known as a specialist natural enemy of spider mites and therefore reared upon spider mites diet. However, spider mites are not suitable to be used in this kind of mite release systems for crop protection for the following reasons:
[0457] Spider mites are pests themselves, and if applied alive, they may damage the crop.
[0458] Spider mites cannot reproduce without being supplied with plant material, therefore can't reproduce in a sachet.
[0459] Without being supplied with a food source, living spider mites die rapidly and shrivel (e.g. within few days).
[0460] If served dead, spider mites quickly shrivel and loose their nutritional value.
[0461] Spider mites are expensive to produce.

[0462] The present invention enables the use of non-hatching (immobilized), in particular frozen, eggs of C. lactis or other Astigmatid mite species as a factitious host for P. persimilis. Contrary to spider mites, non-hatching eggs (e.g. due to immobilization by freezing) of Astigmatids, in particular C. lactis, maintain their nutritional value for about three weeks. This innovative solution enables the release of P. persimilis predatory mites (preferably comprising any one of the herein disclosed genetic markers or any combination thereof) from a container or a mixture combining the predatory mite (preferably comprising any one of the herein disclosed genetic markers or any combination thereof) with its factitious host, applied on the crop plant for controlling pests.

[0463] The present invention provides for the first time genomic sequences and markers that differentiate desirable modified or cultivated P. persimilis populations and lines that are adapted and selected for development and reproduction on non-Tetranychid arthropod prey as the sole food source, from the naturally occurring and non-modified modified or non-cultivated P. persimilis individuals using and reproducing on Tetranychid arthropod prey, that lack the genomic sequences and markers provided herewith.

[0464] It is evident by the results disclosed herein that the present invention provides novel and unique molecular markers for identifying a P. persimilis population characterized by improved and desirable development and reproduction capacity on an alternative diet of non-Tetranychid mite species. Each one of the identified genetic variants (SNPs) or any of their combinations may be in a homozygous configuration or in a heterozygous configuration.

[0465] According to further aspects, the present invention provides robust technique for examining whole genome sequence of populations of mites and molecular markers for multiple loci by using individual mites. The P. persimilis DNA template generated by the inventors can be used for multiple PCR reactions useful for genetic studies requiring the genotypes of individual mites.

[0466] The genetic profiling results of the present invention summarized in Table 1 (and primer sequences for identifying the genetic markers in Table 2) present newly identified haplotypes comprising combinations of genetic variants depicted in these tables. The haplotype combinations are unique for and associated with all tested P+ type P. persimilis populations. The newly identified genetic variants can be used to identify, detect, select and/or screen for the P+ type populations and lines which exhibits significantly improved development and reproduction parameters preying on Astigmatid species, as compared with the non-P+ populations type (P−), which herein show a different genetic profile and allelic haplotype. These development and reproduction parameters may include increased daily reproduction rate, increased daily oviposition rate, high percentage of female individuals capable of reproduction on the non-Tetranychid arthropod prey, and enhanced juvenile and adult female survival rate. The selected P. persimilis line of the present invention exhibits a similar and even improved ability to control their natural prey, spider mites.

[0467] The present invention provides genomic markers and sequences uniquely associated with and capable of detecting a P. persimilis populations adapted to and exhibiting increased yield and high reproduction characteristics when reared on non-Tetranychid arthropod prey, such as Astigmatid mite species, as compared to P. persimilis populations absent of the unique genomic markers and sequences. Therefore, these biomarkers are useful in detecting P. persimilis, which exhibits highly efficient development and reproduction on non-phytophagous prey, and screening out P. persimilis populations with low ability to develop and reproduce on such a non-Tetranychid alternative prey.

[0468] According to one embodiment, the present invention provides a biological control composition comprising a cultivated rearing population of Phytoseiulus persimilis (P. persimilis) predatory mite individuals, and optionally a carrier material, wherein at least 5% of said P. persimilis individuals comprise within their genome at least one Single Nucleotide Polymorphism (SNP) marker selected from: (a) SNP at position 34739 of SEQ ID NO:84 or a variant, portion or complementary sequence thereof, (b) at least one SNP at a position selected from 105452, 109775, 115020, 115073, 125940, 131548 and 131555, of SEQ ID NO:85 or a variant, portion or complementary sequence thereof, (c) at least one SNP at a position selected from 99333, 99595, 99605, 115325 and 115354, of SEQ ID NO:86 or a variant, portion or complementary sequence thereof, (d) at least one SNP at a position selected from 4508, 11697, 12229, 13135, 32979, 38081, 38220, of SEQ ID NO:87 or a variant, portion or complementary sequence thereof, (e) at least one SNP at a position selected from 30913, 34950, 38409, 38458, 42427, 42604 and 43158 of SEQ ID NO:88 or a variant, portion or complementary sequence thereof, (f) SNP at position 1032 of SEQ ID NO:89 or a variant, portion or complementary sequence thereof, (g) SNP at position 173977 and/or SNP at position 228195 of SEQ ID NO:90 or a variant, portion or complementary sequence thereof, and (h) at least one SNP at a position selected from 857, 15689, 40135 and 49492 of SEQ ID NO:91 or a variant, portion or complementary sequence thereof.

[0469] According to a further embodiment, the present invention provides the biological control composition as defined above, wherein the at least one SNP is selected from: (a) SNP of G at position 34739 of SEQ ID NO:84 or a variant, portion or complementary sequence thereof, (b) at least one SNP selected from C at position 105452, G at position 109775, A at position 115020, T at position 115073, C at position 125940, G at position 131548, G at position 131555, of SEQ ID NO:85 or a variant, portion or complementary sequence thereof, (c) at least one SNP selected from A at position 99333, G at position 99595, T at position 99605, A at position 115325, C at position 115354, of SEQ ID NO:86 or a variant, portion or complementary sequence thereof, (d) at least one SNP selected from A at position 4508, A at position 11697, C at position 12229, A at position 13135, C at position 32979, G at position 38081, C at position 38220 of SEQ ID NO:87 or a variant, portion or complementary sequence thereof, (e) at least one SNP selected from A at position 30913, C at position 34950, C at position 38409, A at position 38458, T at position 42427, G at position 42604, T at position 43158 of SEQ ID NO:88 or a variant, portion or complementary sequence thereof, (f) SNP of G at position 1032 of SEQ ID NO:89 or a variant, portion or complementary sequence thereof, (g) SNP of A at position 173977 and/or SNP of T at position 228195 of SEQ ID NO:90 or a variant, portion or complementary sequence thereof, and (h) at least one SNP selected from C at position 857, T at position 15689, C at position 40135, G at position 49492 of SEQ ID NO:91 or a variant, portion or complementary sequence thereof.

[0470] According to a further embodiment, the present invention provides the biological control composition as defined in any above, wherein said variant comprises at least 90% sequence similarity to the corresponding SEQ ID nucleotide sequence.

[0471] According to a further embodiment, the present invention provides the biological control composition as defined in any of the above, wherein at least 5.5%, such as at least 10%, 20%, 30%, 40%, 50%, 60%, 70%, 80%, at least 90% or 100% of said P. persimilis predatory individuals of said cultivated population comprise said at least one SNP marker.

[0472] According to a further embodiment, the present invention provides the biological control composition as defined in any of the above, wherein the at least 5% of said P. persimilis predatory individuals comprise within their genome a polynucleotide genomic sequence selected from SEQ ID NO:1-28 and SEQ ID NO:84-91, and any combination thereof.

[0473] According to a further embodiment, the present invention provides the biological control composition as defined in any of the above, wherein the at least 5% of said P. persimilis predatory individuals comprise within their genome a polynucleotide genomic sequence selected from SEQ ID NO:1 to SEQ ID NO:91, and any combination thereof.

[0474] According to a further embodiment, the present invention provides the biological control composition as defined in any of the above, wherein the cultivated rearing population of P. persimilis predatory mite individuals is characterized by improved rearing properties on a non-Tetranychid arthropod prey as a factious host, preferably on an immobilized non-Tetranychid arthropod prey, such as on an Astigmatid prey, most preferably on an immobilized Astigmatid prey, as compared to a P. persimilis population characterized by less than 5% individuals comprising within their genome said at least one SNP marker.

[0475] According to a further embodiment, the present invention provides the biological control composition as defined in any of the above, wherein the cultivated rearing population of P. persimilis predatory mite individuals is characterized by a daily reproduction rate (λ) of above 1.06, preferably in the range of 1.10-1.40, such as 1.15-1.40, 1.20-1.40, 1.25-1.40, 1.30-1.40, or 1.10-1.35, 1.10-1.30, 1.10-1.25, 1.10-1.20, while preying on a non-Tetranychid arthropod as a food source, preferably on an immobilized non-Tetranychid arthropod prey, such as on an Astigmatid prey, most preferably on an immobilized Astigmatid prey.

[0476] According to a further embodiment, the present invention provides the biological control composition as defined in any of the above, wherein the composition further comprises as a food source for the P. persimilis predatory mites of the cultivated rearing population, a non-Tetranychid arthropod prey, preferably an immobilized non-Tetranychid arthropod prey, such as on an Astigmatid prey, most preferably on an immobilized Astigmatid prey.

[0477] According to a further embodiment, the present invention provides the biological control composition as defined in any of the above, wherein the non-Tertranychid arthropod prey is selected from an Astigmatid mite species, an Artemia species, species from the Phytoseiidae family, Thrips such as Frankliniella occidentalis, Tarsonemidae mite species, and lepidopteran eggs such as of Ephestia kunhiela.

[0478] According to a further embodiment, the present invention provides the biological control composition as defined in any of the above, wherein said Astigmata prey species is selected from members of the family Acaridae, Carpoglyphidae, Glycyphagidae, and/or from the family Chortoglyphagidae.

[0479] According to a further embodiment, the present invention provides the biological control composition as defined in any of the above, wherein the at least one species from the order Astigmata is selected from members of a genus such as Acarus, Tyrophagus, Aleuroglyphus, Lardoglyphus, Caloglyphus, Suidasia, Thyreophagus, Carpoglyphus, Glycyphagus, Lepidoglyphus, Blomia, and/or Chortoglyphus.

[0480] According to a further embodiment, the present invention provides the biological control composition as defined in any of the above, wherein the at least one species from the order Astigmata is selected from: Acarus siro, Acarusfarris, Acarus immobilis, Acarus chaetoxysilos, Tyrophagus longior, Tyrophagus similis, Tyrophagus putrescentiae, Tyrophagus communis, Aleuroglyphus ovatus, Lardoglyphus konoi, Caloglyphus mycophagus, Suidasia nesbitti, Thyreophagus entomophagus, Carpoglyphus lactis, Carpoglyphus munroi, Glycyphagus domesticus, Lepidoglyphus destructor, Blomia freeman, Blomia tropicalis and/or Chortoglyphus arcuatus.

[0481] According to a further embodiment, the present invention provides the biological control composition as defined in any of the above, wherein said Astigmatid mite species is selected from:
[0482] i) Carpoglyphidae such as from the genus Carpoglyphus e.g. Carpoglyphus lactis;
[0483] ii) Pyroglyphidae such as from the genus Dermatophagoides e.g. Dermatophagoides pteronysinus, Dermatophagoides farinae; from the genus Euroglyphus e.g. Euroglyphus longior, Euroglyphus maynei; from the genus Pyroglyphus e.g. Pyroglyphus africanus;
[0484] iii) Glycyphagidae such as from the subfamily Ctenoglyphinae, such as from the genus Diamesoglyphus e.g. Diamesoglyphus intermedius, or from the genus Ctenoglyphus, e.g. Ctenoglyphus plumiger, Ctenoglyphus canestrinii, Ctenoglyphus palmifer; the subfamily Glycyphaginae, such as from the genus Blomia, e.g. Blomia freemani or from the genus Glycyphagus, e.g. Glycyphagus ornatus, Glycyphagus bicaudatus, Glycyphagus privatus, Glycyphagus domesticus, or from the genus Lepidoglyphus e.g. Lepidoglyphus michaeli, Lepidoglyphus fustifer, Lepidoglyphus destructor, or from the genus Austroglycyphagus, e.g. Austroglycyphagus geniculatus; from the subfamily Airoglyphinae, such as from the genus Airoglyphus, e.g. Airoglyphus robustus; from the subfamily Labidophorinae, such as from the genus Gohieria, e.g. Gohieria. fusca; or from the subfamily Nycteriglyphinae such as from the genus Coproglyphus, e.g. Coproglyphus stammeri or from the subfamily Chortoglyphidae, such as the genus Chortoglyphus e.g. Chortoglyphus arcuatus;
[0485] iv) Acaridae such as from the genus Tyrophagus e.g. Tyrophagus putrescentiae, Tyrophagus tropicus, Tyrophagus communis from the genus Acarus e.g. Acarus siro, Acarus farris, Acarus gracilis; from the genus Lardoglyphus e.g. Lardoglyphus konoi, from the genus Thyreophagus, such as Thyreophagus entomophagus; from the genus Aleuroglyphus, e.g. Aleuroglyphus ovatus;
[0486] v) Suidasiidae such as from the genus Suidasia, such as Suidasia nesbiti, Suidasia pontifica or Suidasia medanensis.

[0487] According to a further embodiment, the present invention provides the biological control composition as defined in any of the above, wherein the non-Tetranychid arthropod prey comprises immobilized life stages comprising immobilized eggs.

[0488] According to a further embodiment, the present invention provides the biological control composition as defined in any of the above, wherein said immobilization is carried out by a treatment selected from: thermal treatment, such as freezing, freeze-drying, heating, cold-shock or heat-shock treatment; chemical treatment, such as gas or fume treatment; radiation treatment, such as UV, microwave, gamma irradiation or X-ray treatment; mechanical treatment, such as vigorous shaking, or stirring, subjecting to shear forces, collision; gas pressure treatment, such as ultrasound treatment, pressure changes, pressure drops; electrical treatment, such as electrocution; immobilizing with an adhesive; immobilization by starvation, such as induced by water or food deprivation; immobilization by suffocation or anoxia treatment, such as by temporarily eliminating oxygen from the atmosphere or replacing oxygen by another gas and any combination thereof.

[0489] According to a further embodiment, the present invention provides the biological control composition as defined in any of the above, wherein the improved rearing properties of the cultivated rearing P. persimilis population on a non-Tetranychid arthropod prey, are selected from the following parameters: increased daily reproduction rate (λ), increased daily oviposition rate, increased survival rate, lower mortality rate, increased juvenile and/or female survival rate, increased percentage of female individuals reproducing on said prey, and improved or similar predatory behavior towards a Tetranychid species, as compared to a population of P. persimilis individuals characterized by less than 5% individuals comprising within their genome said at least one SNP marker.

[0490] According to a further embodiment, the present invention provides the biological control composition as defined in any of the above, wherein said carrier material is selected from particles or elements of sawdust, vermiculite, bran, wheat bran, buckwheat husks, rice husks or millet husks, or comprising a mixture thereof, or any other inert carrier material and/or any carrier having carrier elements comprising surfaces to which mites can adhere or carrier elements comprising mite shelters.

[0491] According to a further embodiment, the present invention provides the biological control composition as defined in any of the above, wherein said composition is contained in a container such as a sachet, a bottle or any other packaging type container or device configured to holding the biological control composition.

[0492] According to a further embodiment, the present invention provides a method for obtaining a biological control composition comprising a cultivated rearing population of Phytoseiulus persimilis (P. persimilis) predatory mite individuals as defined in any of the above, wherein said method comprises steps of: (a) providing a rearing population of a P. persimilis predatory mite species, the rearing population comprising individuals of the P. persimilis species, reared on a suitable food source for the Phytoseiulus individuals, said food source comprising a prey species selected from the Tetranychidae species; (b) providing a population of individuals of preselected non-Tetranychid arthropod species, preferably an Astigmatid mite species, most preferably an immobilized Astigmatid mite species having immobilized life stages comprising immobilized eggs; (c) rearing the P. persimilis individuals on the preselected non-Tetranychid arthropod species as a food source; (d) screening the genome of a sample of P. persimilis individuals for the presence of at least 5% of at least one SNP selected from: (i) SNP of G at position 34739 of SEQ ID NO:84 or a variant, portion or complementary sequence thereof, (ii) at least one SNP selected from C at position 105452, G at position 109775, A at position 115020, T at position 115073, C at position 125940, G at position 131548, G at position 131555, of SEQ ID NO:85 or a variant, portion or complementary sequence thereof, (iii) at least one SNP selected from A at position 99333, G at position 99595, T at position 99605, A at position 115325, C at position 115354, of SEQ ID NO:86 or a variant, portion or complementary sequence thereof, (iv) at least one SNP selected from A at position 4508, A at position 11697, C at position 12229, A at position 13135, C at position 32979, G at position 38081, C at position 38220 of SEQ ID NO:87 or a variant, portion or complementary sequence thereof, (v) at least one SNP selected from A at position 30913, C at position 34950, C at position 38409, A at position 38458, T at position 42427, G at position 42604, T at position 43158 of SEQ ID NO:88 or a variant, portion or complementary sequence thereof, (vi) SNP of G at position 1032 of SEQ ID NO:89 or a variant, portion or complementary sequence thereof, (vii) SNP of A at position 173977 and/or SNP of T at position 228195 of SEQ ID NO:90 or a variant, portion or complementary sequence thereof, and (viii) at least one SNP selected from C at position 857, T at position 15689, C at position 40135, G at position 49492 of SEQ ID NO:91 or a variant, portion or complementary sequence thereof; (e) optionally, alternatingly rearing selected Phytoseiulus individuals in a sequence of:
[0493] rearing for at least 2, such as between 5 and 50, generations while using a food source comprising the preselected non-Tetranychid arthropod species;
[0494] rearing for at least 2, such as between 5 and 50, generations while using a food source comprising the prey species selected from the Tetranychidae
[0495] screening the genome of a sample of P. persimilis individuals for the presence of at least 5% of the at least one SNP.

[0496] According to a further embodiment, the present invention provides the method as defined above, further comprises steps of: (a) separating eggs and/or juvenile developmental stages such as larvae and/or nymphs from the preselected non-Tetranychid arthropod prey rearing population; (b) mixing the separated eggs and/or juvenile developmental stages such as larvae and/or nymphs with a carrier material, such as a carrier material selected from sawdust, wheat bran, buckwheat husks, rice husks or millet husks, or comprising a mixture thereof; (c) freezing the mixture of step (b); and (d) rearing the predatory mite individuals on the mixture as a food source.

[0497] According to a further embodiment, the present invention provides the method as defined in any of the above, wherein the provided rearing population is a population composed of a number of sub-populations, wherein said sub-populations are from distinct sources, such as from distinct production populations and/or from natural populations isolated from distinct geographical locations.

[0498] According to a further embodiment, the present invention provides the method as defined in any of the above, wherein the provided rearing population comprises at least 100 individuals, such as between 200 and 5000 individuals, preferably between 500 and 1500 individuals.

[0499] According to a further embodiment, the present invention provides the method as defined in any of the above, wherein the sample for genome screening comprises at least 50 individuals, such as between 100 and 300 individuals.

[0500] According to a further embodiment, the present invention provides use of a biological control composition as defined in any of the above, for controlling a pest in a crop.

[0501] According to a further embodiment, the present invention provides a method for controlling a pest in a crop comprising providing the crop with a biological control composition as defined in any of the above.

[0502] According to a further embodiment, the present invention provides a method for screening for or identifying a biological control composition as defined in any of the above, the method comprises steps of: (a) obtaining a sample of said population of individuals, the sample preferably comprise at least 50 individuals; (b) pooling the genome said individuals and screening the pooled genome for the presence of at least 5% of at least one SNP selected from: (i) SNP of G at position 34739 of SEQ ID NO:84 or a variant, portion or complementary sequence thereof, (ii) at least one SNP selected from C at position 105452, G at position 109775, A at position 115020, T at position 115073, C at position 125940, G at position 131548, G at position 131555, of SEQ ID NO:85 or a variant, portion or complementary sequence thereof, (iii) at least one SNP selected from A at position 99333, G at position 99595, T at position 99605, A at position 115325, C at position 115354, of SEQ ID NO:86 or a variant, portion or complementary sequence thereof, (iv) at least one SNP selected from A at position 4508, A at position 11697, C at position 12229, A at position 13135, C at position 32979, G at position 38081, C at position 38220 of SEQ ID NO:87 or a variant, portion or complementary sequence thereof, (v) at least one SNP selected from A at position 30913, C at position 34950, C at position 38409, A at position 38458, T at position 42427, G at position 42604, T at position 43158 of SEQ ID NO:88 or a variant, portion or complementary sequence thereof, (vi) SNP of G at position 1032 of SEQ ID NO:89 or a variant, portion or complementary sequence thereof, (vii) SNP of A at position 173977 and/or SNP of T at position 228195 of SEQ ID NO:90 or a variant, portion or complementary sequence thereof, and (viii) at least one SNP selected from C at position 857, T at position 15689, C at position 40135, G at position 49492 of SEQ ID NO:91 or a variant, portion or complementary sequence thereof.

[0503] According to a further embodiment, the present invention provides a cultivated Phytoseiulus persimilis (P. persimilis) mite individual, wherein said cultivated Phytoseiulus predatory individual comprises within its genome at least one single nucleotide polymorphism (SNP) marker selected from:
[0504] a. SNP1 at position corresponding to position 163 of SEQ ID NO:1 or a variant, portion or complementary sequence thereof,
[0505] b. SNP2 at position 181 of SEQ ID NO:2 or a variant, portion or complementary sequence thereof,
[0506] c. SNP3 at position 197 of SEQ ID NO:3 or a variant, portion or complementary sequence thereof,
[0507] d. SNP4 at position 111 and/or SNP5 at position 165 of SEQ ID NO:4 or a variant, portion or complementary sequence thereof,
[0508] e. SNP6 at position 193 of SEQ ID NO:5 or a variant, portion or complementary sequence thereof,
[0509] f. SNP7 at position 186 and/or SNP8 at position 193 of SEQ ID NO:6 or a variant, portion or complementary sequence thereof,
[0510] g. SNP9 at position 161 of SEQ ID NO:7 or a variant, portion or complementary sequence thereof,
[0511] h. SNP10 at position 203 and/or SNP11 at position 213 of SEQ ID NO:8 or a variant, portion or complementary sequence thereof,
[0512] i. SNP12 at position 163 and/or SNP13 at position 192 of SEQ ID NO:9 or a variant, portion or complementary sequence thereof,
[0513] j. SNP14 at position 208 of SEQ ID NO:10 or a variant, portion or complementary sequence thereof,
[0514] k. SNP15 at position 199 of SEQ ID NO:11 or a variant, portion or complementary sequence thereof,
[0515] l. SNP16 at position 266 of SEQ ID NO:12 or a variant, portion or complementary sequence thereof,
[0516] m. SNP17 at position 216 of SEQ ID NO:13 or a variant, portion or complementary sequence thereof,
[0517] n. SNP18 at position 187 of SEQ ID NO:14 or a variant, portion or complementary sequence thereof,
[0518] o. SNP19 at position 279 of SEQ ID NO:15 or a variant, portion or complementary sequence thereof,
[0519] p. SNP20 at position 188 of SEQ ID NO:16 or a variant, portion or complementary sequence thereof,
[0520] q. SNP21 at position 165 of SEQ ID NO:17 or a variant, portion or complementary sequence thereof,
[0521] r. SNP22 at position 183 of SEQ ID NO:18 or a variant, portion or complementary sequence thereof,
[0522] s. SNP23 at position 133 and/or SNP24 at position 182 of SEQ ID NO:19 or a variant, portion or complementary sequence thereof,
[0523] t. SNP25 at position 146 and/or SNP26 position 323 of SEQ ID NO:20 or a variant, portion or complementary sequence thereof,
[0524] u. SNP27 at position 241 of SEQ ID NO:21 or a variant, portion or complementary sequence thereof,
[0525] v. SNP28 at position 236 of SEQ ID NO:22 or a variant, portion or complementary sequence thereof,
[0526] w. SNP29 at position 199 of SEQ ID NO:23 or a variant, portion or complementary sequence thereof,
[0527] x. SNP30 at position 185 of SEQ ID NO:24 or a variant, portion or complementary sequence thereof,
[0528] y. SNP31 at position 158 of SEQ ID NO:25 or a variant, portion or complementary sequence thereof,
[0529] z. SNP32 at position 143 of SEQ ID NO:26 or a variant, portion or complementary sequence thereof,
[0530] aa. SNP33 at position 157 of SEQ ID NO:27 or a variant, portion or complementary sequence thereof, and
[0531] bb. SNP34 at position 161 of SEQ ID NO:28 or a variant, portion or complementary sequence thereof, and any combination thereof.

[0532] According to a further embodiment, the present invention provides the cultivated P. persimilis mite individual as defined in any of the above, wherein said variant comprises at least 90% sequence similarity to the corresponding nucleotide SEQ ID sequence.

[0533] According to a further embodiment, the present invention provides the cultivated P. persimilis mite individual as defined in any of the above, wherein said P. persimilis predatory individual comprising within it's genome a polynucleotide sequence selected from SEQ ID NO:1 to SEQ ID NO:28, and any combination thereof.

[0534] According to a further embodiment, the present invention provides the cultivated P. persimilis mite individual as defined in any of the above, wherein the at least one SNP is detected using primers comprising pairs of sequences selected from: SEQ ID NO:29 and SEQ ID NO:30 for detection of SNP1, SEQ ID NO:31 and SEQ ID NO:32 for detection of SNP2, SEQ ID NO:33 and SEQ ID NO:34 for detection of SNP3, SEQ ID NO:35 and SEQ ID NO:36 for detection of SNP4-5, SEQ ID NO:37 and SEQ ID NO:38 for detection of SNP6, SEQ ID NO:39 and SEQ ID NO:40 for detection of SNP7-8, SEQ ID NO:41 and SEQ ID NO:42 for detection of SNP9, SEQ ID NO:43 and SEQ ID NO:44 for detection of SNP10-11, SEQ ID NO:45 and SEQ ID NO:46 for detection of SNP12-13, SEQ ID NO:47 and SEQ ID NO:48 for detection of SNP14, SEQ ID NO:49 and SEQ ID NO:50 for detection of SNP15-16, SEQ ID NO:51 and SEQ ID NO:50 for detection of SNP16, SEQ ID NO:52 and SEQ ID NO:53 for detection of SNP17, SEQ ID NO:54 and SEQ ID NO:55 for detection of SNP18, SEQ ID NO:56 and SEQ ID NO:57 for detection of SNP19, SEQ ID NO:58 and SEQ ID NO:59 for detection of SNP20, SEQ ID NO:60 and SEQ ID NO:61 for detection of SNP21, SEQ ID NO:62 and SEQ ID NO:63 for detection of SNP22, SEQ ID NO:64 and SEQ ID NO:65 for detection of SNP23-24, SEQ ID NO:66 and SEQ ID NO:67 for detection of SNP25-26, SEQ ID NO:68 and SEQ ID NO:69 for detection of SNP27, SEQ ID NO:70 and SEQ ID NO:71 for detection of SNP28, SEQ ID NO:72 and SEQ ID NO:73 for detection of SNP29, SEQ ID NO:74 and SEQ ID NO:75 for detection of SNP30, SEQ ID NO:76 and SEQ ID NO:77 for detection of SNP31, SEQ ID NO:78 and SEQ ID NO:79 for detection of SNP32, SEQ ID NO:80 and SEQ ID NO:81 for detection of SNP33, and SEQ ID NO:82 and SEQ ID NO:83 for detection of SNP34.

[0535] According to a further embodiment, the present invention provides an isolated cell of the cultivated Phytoseiulus persimilis (P. persimilis) predatory mite as defined in any of the above.

[0536] According to a further embodiment, the present invention provides a Phytoseiulus persimilis rearing mite population, wherein at least 5% of the population are the cultivated P. persimilis mite individuals as defined in any of the above.

[0537] According to a further embodiment, the present invention provides the Phytoseiulus persimilis rearing mite population as defined in any of the above, wherein the population further comprises a food source for the P. persimilis predatory mites, said food source comprises a non-Tetranychid arthropod as a factitious host, preferably an immobilized non-Tetranychid arthropod prey, such as on an Astigmatid prey, most preferably on an immobilized Astigmatid prey.

[0538] According to a further embodiment, the present invention provides the Phytoseiulus persimilis rearing mite population as defined in any of the above, wherein the population is characterized by improved rearing properties on a non-Tetranychid arthropod prey as a food source, preferably on an immobilized non-Tetranychid arthropod prey, such as on an Astigmatid prey, most preferably on an immobilized Astigmatid prey.

[0539] According to a further embodiment, the present invention provides the Phytoseiulus persimilis rearing mite population as defined in any of the above, wherein the improved rearing properties on a non-Tetranychid arthropod prey are selected from the following parameters: increased daily reproduction rate (λ), increased daily oviposition rate, increased survival rate, lower mortality rate, increased juvenile and/or female survival rate, increased percentage of female individuals reproducing on said prey, and improved or similar predatory behavior towards a Tetranychid species, as compared to a population of P. persimilis individuals characterized by less than 5% individuals comprising within their genome said at least one SNP marker.

[0540] According to a further embodiment, the present invention provides the Phytoseiulus persimilis rearing mite population as defined in any of the above, wherein the population is characterized by a daily reproduction rate (λ) of above 1.06, preferably in the range of 1.10-1.40, such as 1.15-1.40, 1.20-1.40, 1.25-1.40, 1.30-1.40, or 1.10-1.35, 1.10-1.30, 1.10-1.25, 1.10-1.20, while preying on a non-Tetranychid arthropod as a food source, preferably on an immobilized non-Tetranychid arthropod prey, such as on an Astigmatid prey, most preferably on an immobilized Astigmatid prey.

[0541] According to a further embodiment, the present invention provides use of a Phytoseiulus persimilis rearing mite population as defined in any of the above, for controlling a pest in a crop.

[0542] According to a further embodiment, the present invention provides a method for controlling a pest in a crop comprising providing the crop with a Phytoseiulus persimilis rearing mite population as defined in any of the above.

[0543] According to a further embodiment, the present invention provides device for releasing mite individuals of a Phytoseiulus persimilis predatory mite species, said device comprising a container holding a biological control composition as defined in any of the above, or a Phytoseiulus persimilis rearing mite population as defined in any of the above, wherein the device comprises an exit for mobile life stages of the P. persimilis predatory mite species, preferably an exit suitable for providing a sustained release of a number of mobile life stages.

[0544] According to a further embodiment, the present invention provides use of a biological control composition as defined in any of the above, or a Phytoseiulus persimilis rearing mite population as defined in any of the above, preferably in a device as defined in any of the above, for crop protection.

[0545] According to a further embodiment, the present invention provides use of a non-Tetranychid arthropod species, preferably an immobilized non-Tetranychid arthropod species, such as a non-phytophagous prey, preferably an Astigmatid species, most preferably an immobilized Astigmatid species, such as most preferably an immobilized Astigmatid species, in particular a Carpoglyhus species, having immobilized life stages comprising immobilized eggs, as a food source, preferably as a rearing prey, for a Phytoseiulus persimilis rearing mite population as defined in any of the above.

[0546] According to a further embodiment, the present invention provides the use as defined in any of the above, wherein said use comprises applying individuals of a non-Tetranychid arthropod species to a target plant, preferably an immobilized non-Tetranychid arthropod species, such as a non-phytophagous prey, preferably an Astigmatid species, most preferably an immobilized Astigmatid species, such as most preferably an immobilized Astigmatid species, in particular a Carpoglyhus species, having immobilized life stages comprising immobilized eggs, or a mixture of immobilized life stages comprising eggs and mobile stages of the non-Tetranychid arthropod species.

[0547] According to a further embodiment, the present invention provides a method for identifying and/or selecting Phytoseiulus persimilis (P. persimilis) predatory mite individuals characterized by improved rearing properties on a non-Tetranychid arthropod prey as a food source, preferably on an immobilized non-Tetranychid arthropod prey, such as on an Astigmatid prey, most preferably on an immobilized Astigmatid prey, wherein said method comprises detecting in the genome of the P. persimilis predatory mite individuals, the presence of a genomic haplotype comprising a single nucleotide polymorphism (SNP) marker at a position corresponding to at least one of: SNP1 at position 163 of SEQ ID NO:1 or a variant, portion or complementary sequence thereof, SNP2 at position 181 of SEQ ID NO:2 or a variant, portion or complementary sequence thereof, SNP3 at position 197 of SEQ ID NO:3 or a variant, portion or complementary sequence thereof, SNP4 at position 111 of SEQ ID NO:4 or a variant, portion or complementary sequence thereof, SNP5 at position 165 of SEQ ID NO:4 or a variant, portion or complementary sequence thereof, SNP6 at position 193 of SEQ ID NO:5 or a variant, portion or complementary sequence thereof, SNP7 at position 186 of SEQ ID NO:6 or a variant, portion or complementary sequence thereof, SNP8 at position 193 of SEQ ID NO:6 or a variant, portion or complementary sequence thereof, SNP9 at position 161 of SEQ ID NO:7 or a variant, portion or complementary sequence thereof, SNP10 at position 203 of SEQ ID NO:8 or a variant, portion or complementary sequence thereof, SNP11 at position 213 of SEQ ID NO:8 or a variant, portion or complementary sequence thereof, SNP12 at position 163 of SEQ ID NO:9 or a variant, portion or complementary sequence thereof, SNP13 at position 192 of SEQ ID NO:9 or a variant, portion or complementary sequence thereof, SNP14 at position 208 of SEQ ID NO:10 or a variant, portion or complementary sequence thereof, SNP15 at position 199 of SEQ ID NO:11 or a variant, portion or complementary sequence thereof, SNP16 at position 266 of SEQ ID NO:12 or a variant, portion or complementary sequence thereof, SNP17 at position 216 of SEQ ID NO:13 or a variant, portion or complementary sequence thereof, SNP18 at position 187 of SEQ ID NO:14 or a variant, portion or complementary sequence thereof, SNP19 at position 279 of SEQ ID NO:15 or a variant, portion or complementary sequence thereof, SNP20 at position 188 of SEQ ID NO:16 or a variant, portion or complementary sequence thereof, SNP21 at position 165 of SEQ ID NO:17 or a variant, portion or complementary sequence thereof, SNP22 at position 183 of SEQ ID NO:18 or a variant, portion or complementary sequence thereof, SNP23 at position 133 of SEQ ID NO:19 or a variant, portion or complementary sequence thereof, SNP24 at position 182 of SEQ ID NO:19 or a variant, portion or complementary sequence thereof, SNP25 at position 146 of SEQ ID NO:20 or a variant, portion or complementary sequence thereof, SNP26 at position 323 of SEQ ID NO:20 or a variant, portion or complementary sequence thereof, SNP27 at position 241 of SEQ ID NO:21 or a variant, portion or complementary sequence thereof, SNP28 at position 236 of SEQ ID NO:22 or a variant, portion or complementary sequence thereof, SNP29 at position 199 of SEQ ID NO:23 or a variant, portion or complementary sequence thereof, SNP30 at position 185 of SEQ ID NO:24 or a variant, portion or complementary sequence thereof, SNP31 at position 158 of SEQ ID NO:25 or a variant, portion or complementary sequence thereof, SNP32 at position 143 of SEQ ID NO:26 or a variant, portion or complementary sequence thereof, SNP33 at position 157 of SEQ ID NO:27 or a variant, portion or complementary sequence thereof, SNP34 at position 161 of SEQ ID NO:28 or a variant, portion or complementary sequence thereof, and any combination thereof.

[0548] According to a further embodiment, the present invention provides the method as defined in any of the above, wherein said variant comprises at least 90% similarity to the corresponding nucleotide SEQ ID sequence.

[0549] According to a further embodiment, the present invention provides the method as defined in any of the above, wherein said Phytoseiulus predatory individual comprising a polynucleotide genomic sequence selected from SEQ ID NO:1 to SEQ ID NO:28, and any combination thereof.

[0550] According to a further embodiment, the present invention provides the method as defined in any of the above, wherein the detection is performed using a primer pair selected from: SEQ ID NO:29 and SEQ ID NO:30 for detection of SNP1, SEQ ID NO:31 and SEQ ID NO:32 for detection of SNP2, SEQ ID NO:33 and SEQ ID NO:34 for detection of SNP3, SEQ ID NO:35 and SEQ ID NO:36 for detection of SNP4-5, SEQ ID NO:37 and SEQ ID NO:38 for detection of SNP6, SEQ ID NO:39 and SEQ ID NO:40 for detection of SNP7-8, SEQ ID NO:41 and SEQ ID NO:42 for detection of SNP9, SEQ ID NO:43 and SEQ ID NO:44 for detection of SNP10-11, SEQ ID NO:45 and SEQ ID NO:46 for detection of SNP12-13, SEQ ID NO:47 and SEQ ID NO:48 for detection of SNP14, SEQ ID NO:49 and SEQ ID NO:50 for detection of SNP15-16, SEQ ID NO:51 and SEQ ID NO:50 for detection of SNP16, SEQ ID NO:52 and SEQ ID NO:53 for detection of SNP17, SEQ ID NO:54 and SEQ ID NO:55 for detection of SNP18, SEQ ID NO:56 and SEQ ID NO:57 for detection of SNP19, SEQ ID NO:58 and SEQ ID NO:59 for detection of SNP20, SEQ ID NO:60 and SEQ ID NO:61 for detection of SNP21, SEQ ID NO:62 and SEQ ID NO:63 for detection of SNP22, SEQ ID NO:64 and SEQ ID NO:65 for detection of SNP23-24, SEQ ID NO:66 and SEQ ID NO:67 for detection of SNP25-26, SEQ ID NO:68 and SEQ ID NO:69 for detection of SNP27, SEQ ID NO:70 and SEQ ID NO:71 for detection of SNP28, SEQ ID NO:72 and SEQ ID NO:73 for detection of SNP29, SEQ ID NO:74 and SEQ ID NO:75 for detection of SNP30, SEQ ID NO:76 and SEQ ID NO:77 for detection of SNP31, SEQ ID NO:78 and SEQ ID NO:79 for detection of SNP32, SEQ ID NO:80 and SEQ ID NO:81 for detection of SNP33, SEQ ID NO:82 and SEQ ID NO:83 for detection of SNP34 and any combination of primer pairs.

[0551] According to a further embodiment, the present invention provides the method as defined in any of the above, wherein the improved rearing properties on a non-Tetranychid arthropod prey are selected from the following parameters: increased daily reproduction rate (λ), increased daily oviposition rate, increased survival rate, lower mortality rate, increased juvenile and/or female survival rate, increased percentage of female individuals reproducing on said prey, and improved or similar predatory behavior towards a Tetranychid species, as compared to a population of P. persimilis individuals lacking the at least one SNP and or the polynucleotide sequence selected from SEQ ID NO:1 to SEQ ID NO:28.

[0552] According to a further embodiment, the present invention provides a method for identifying and/or selecting a cultivated rearing population of Phytoseiulus persimilis (P. persimilis) predatory mite individuals characterized by improved rearing properties on a non-Tetranychid arthropod prey as a food source, preferably on an immobilized non-Tetranychid arthropod prey, such as on an Astigmatid prey, most preferably on an immobilized Astigmatid prey, wherein said method comprises detecting in the genome of at least 5% of said P. persimilis individuals at least one Single Nucleotide Polymorphism (SNP) marker selected from:
[0553] a. SNP of G at position 34739 of SEQ ID NO:84 or a variant, portion or complementary sequence thereof,
[0554] b. at least one SNP selected from C at position 105452, G at position 109775, A at position 115020, T at position 115073, C at position 125940, G at position 131548, G at position 131555, of SEQ ID NO:85 or a variant, portion or complementary sequence thereof,
[0555] c. at least one SNP selected from A at position 99333, G at position 99595, T at position 99605, A at position 115325, C at position 115354, of SEQ ID NO:86 or a variant, portion or complementary sequence thereof,
[0556] d. at least one SNP selected from A at position 4508, A at position 11697, C at position 12229, A at position 13135, C at position 32979, G at position 38081, C at position 38220 of SEQ ID NO:87 or a variant, portion or complementary sequence thereof,
[0557] e. at least one SNP selected from A at position 30913, C at position 34950, C at position 38409, A at position 38458, T at position 42427, G at position 42604, T at position 43158 of SEQ ID NO:88 or a variant, portion or complementary sequence thereof,
[0558] f. SNP of G at position 1032 of SEQ ID NO:89 or a variant, portion or complementary sequence thereof,
[0559] g. SNP of A at position 173977 and/or SNP of T at position 228195 of SEQ ID NO:90 or a variant, portion or complementary sequence thereof, and
[0560] h. at least one SNP selected from C at position 857, T at position 15689, C at position 40135, G at position 49492 of SEQ ID NO:91 or a variant, portion or complementary sequence thereof.

[0561] According to a further embodiment, the present invention provides the method as defined in any of the above, wherein said variant comprises at least 90% sequence similarity to the corresponding SEQ ID nucleotide sequence.

[0562] According to a further embodiment, the present invention provides the method as defined in any of the above, wherein at least 5.5%, such as at least 10%, 20%, 30%, 40%, 50%, 60%, 70%, 80%, at least 90% or 100% of said P. persimilis predatory individuals of said cultivated population comprise said at least one SNP marker.

[0563] According to a further embodiment, the present invention provides the method as defined in any of the above, wherein the at least 5% of said P. persimilis predatory individuals comprise within their genome a polynucleotide genomic sequence selected from SEQ ID NO:1-28 and SEQ ID NO:84-91, and any combination thereof.

[0564] According to a further embodiment, the present invention provides the method as defined in any of the above, wherein the at least 5% of said P. persimilis predatory individuals comprise within their genome a polynucleotide genomic sequence selected from SEQ ID NO:1 to SEQ ID NO:91, and any combination thereof.

[0565] According to a further embodiment, the present invention provides the method as defined in any of the above, wherein the cultivated rearing population of P. persimilis predatory mite individuals is characterized by improved rearing properties on a non-Tetranychid arthropod prey as a factious host, preferably on an immobilized non-Tetranychid arthropod prey, such as on an Astigmatid prey, most preferably on an immobilized Astigmatid prey, as compared to a P. persimilis population characterized by less than 5% individuals comprising within their genome said at least one SNP marker.

[0566] According to a further embodiment, the present invention provides the method as defined in any of the above, wherein the cultivated rearing population of P. persimilis predatory mite individuals is characterized by a daily reproduction rate (λ) of above 1.06, preferably in the range of 1.10-1.40, such as 1.15-1.40, 1.20-1.40, 1.25-1.40, 1.30-1.40, or 1.10-1.35, 1.10-1.30, 1.10-1.25, 1.10-1.20, while preying on a non-Tetranychid arthropod as a food source, preferably on an immobilized non-Tetranychid arthropod prey, such as on an Astigmatid prey, most preferably on an immobilized Astigmatid prey.

[0567] According to a further embodiment, the present invention provides a method for obtaining a Phytoseiulus persimilis rearing mite population characterized by improved rearing properties on a non-Tetranychid arthropod prey as a factious host, preferably on an immobilized non-Tetranychid arthropod prey, such as on an Astigmatid prey, most preferably on an immobilized Astigmatid prey, wherein at least 5% of the population are the cultivated P. persimilis mite individuals as defined in any of the above, said method comprises steps of:
[0568] a. providing a rearing population of a P. persimilis predatory mite species, the rearing population comprising individuals of the P. persimilis species, reared on a suitable food source for the Phytoseiulus individuals, said food source comprising a prey species selected from the Tetranychidae species;
[0569] b. providing a population of individuals of preselected non-Tetranychid arthropod species, preferably an Astigmatid mite species, most preferably an immobilized Astigmatid mite species having immobilized life stages comprising immobilized eggs;
[0570] c. rearing the P. persimilis individuals on the preselected non-Tetranychid arthropod species as a food source;
[0571] d. screening the genome of a sample of P. persimilis individuals for the presence of at least 5% of at least one SNP selected from:
   [0572] i SNP of G at position 34739 of SEQ ID NO:84 or a variant, portion or complementary sequence thereof,
   [0573] ii at least one SNP selected from C at position 105452, G at position 109775, A at position 115020, T at position 115073, C at position 125940, G at position 131548, G at position 131555, of SEQ ID NO:85 or a variant, portion or complementary sequence thereof,
   [0574] iii at least one SNP selected from A at position 99333, G at position 99595, T at position 99605, A at position 115325, C at position 115354, of SEQ ID NO:86 or a variant, portion or complementary sequence thereof,
   [0575] iv at least one SNP selected from A at position 4508, A at position 11697, C at position 12229, A at position 13135, C at position 32979, G at position 38081, C at position 38220 of SEQ ID NO:87 or a variant, portion or complementary sequence thereof,
   [0576] v at least one SNP selected from A at position 30913, C at position 34950, C at position 38409, A at position 38458, T at position 42427, G at position 42604, T at position 43158 of SEQ ID NO:88 or a variant, portion or complementary sequence thereof,
   [0577] vi SNP of G at position 1032 of SEQ ID NO:89 or a variant, portion or complementary sequence thereof,
   [0578] vii SNP of A at position 173977 and/or SNP of T at position 228195 of SEQ ID NO:90 or a variant, portion or complementary sequence thereof, and
   [0579] viii at least one SNP selected from C at position 857, T at position 15689, C at position 40135, G at position 49492 of SEQ ID NO:91 or a variant, portion or complementary sequence thereof;
[0580] e. optionally, alternatingly rearing selected Phytoseiulus individuals in a sequence of:
   [0581] rearing for at least 2, such as between 5 and 50, generations while using a food source comprising the preselected non-Tetranychid arthropod species;
   [0582] rearing for at least 2, such as between 5 and 50, generations while using a food source comprising the prey species selected from the Tetranychidae
   [0583] screening the genome of a sample of P. persimilis individuals for the presence of at least 5% of the at least one SNP.

[0584] According to a further embodiment, the present invention provides the method as defined in any of the above, further comprises steps of:
[0585] a. separating eggs and/or juvenile developmental stages such as larvae and/or nymphs from the preselected non-Tetranychid arthropod prey rearing population;
[0586] b. mixing the separated eggs and/or juvenile developmental stages such as larvae and/or nymphs with a carrier material, such as a carrier material selected from sawdust, wheat bran, buckwheat husks, rice husks or millet husks, or comprising a mixture thereof;
[0587] c. freezing the mixture of step (b); and
[0588] d. rearing the predatory mite individuals on the mixture as a food source.

[0589] According to a further embodiment, the present invention provides the method as defined in any of the above, wherein the provided rearing population is a population composed of a number of sub-populations, wherein said sub-populations are from distinct sources, such as from distinct production populations and/or from natural populations isolated from distinct geographical locations.

[0590] According to a further embodiment, the present invention provides the method as defined in any of the above, wherein the provided rearing population comprises at least 100 individuals, such as between 200 and 5000 individuals, preferably between 500 and 1500 individuals.

[0591] According to a further embodiment, the present invention provides the method as defined in any of the above, wherein the sample for genome screening comprises at least 50 individuals, such as between 100 and 300 individuals.

[0592] According to a further embodiment, the present invention provides the method as defined in any of the above, wherein the cultivated rearing population of P. persimilis predatory mite individuals is characterized by a daily reproduction rate (λ) of above 1.06, preferably in the range of 1.10-1.40, such as 1.15-1.40, 1.20-1.40, 1.25-1.40, 1.30-1.40, or 1.10-1.35, 1.10-1.30, 1.10-1.25, 1.10-1.20, while preying on a non-Tetranychid arthropod as a food source, preferably on an immobilized non-Tetranychid arthropod prey, such as on an Astigmatid prey, most preferably on an immobilized Astigmatid prey.

[0593] According to a further embodiment, the present invention provides an isolated nucleic acid sequence comprising at least 90% similarity to a polynucleotide sequence selected from SEQ ID NO:1 to SEQ ID NO:91 or a portion thereof and any combination thereof.

[0594] According to a further embodiment, the present invention provides use of a nucleic acid sequence selected from SEQ ID NO:84 to SEQ ID NO:91 or a portion thereof to identify a rearing population of Phytoseiulus persimilis (P. persimilis) predatory mite individuals characterized by improved rearing properties on a non-Tetranychid arthropod prey as a factitious host, preferably on an immobilized non-Tetranychid arthropod prey, such as on an Astigmatid prey, most preferably on an immobilized Astigmatid prey, wherein at least 5% of said P. persimilis individuals comprise within their genome at least one Single Nucleotide Polymorphism (SNP) marker selected from:
[0595] a. SNP of G at position 34739 of SEQ ID NO:84 or a variant, portion or complementary sequence thereof,
[0596] b. at least one SNP selected from C at position 105452, G at position 109775, A at position 115020, T at position 115073, C at position 125940, G at position 131548, G at position 131555, of SEQ ID NO:85 or a variant, portion or complementary sequence thereof,
[0597] c. at least one SNP selected from A at position 99333, G at position 99595, T at position 99605, A at position 115325, C at position 115354, of SEQ ID NO:86 or a variant, portion or complementary sequence thereof,
[0598] d. at least one SNP selected from A at position 4508, A at position 11697, C at position 12229, A at position 13135, C at position 32979, G at position 38081, C at position 38220 of SEQ ID NO:87 or a variant, portion or complementary sequence thereof,
[0599] e. at least one SNP selected from A at position 30913, C at position 34950, C at position 38409, A at position 38458, T at position 42427, G at position 42604, T at position 43158 of SEQ ID NO:88 or a variant, portion or complementary sequence thereof,
[0600] f. SNP of G at position 1032 of SEQ ID NO:89 or a variant, portion or complementary sequence thereof,
[0601] g. SNP of A at position 173977 and/or SNP of T at position 228195 of SEQ ID NO:90 or a variant, portion or complementary sequence thereof, and
[0602] h. at least one SNP selected from C at position 857, T at position 15689, C at position 40135, G at position 49492 of SEQ ID NO:91 or a variant, portion or complementary sequence thereof.

[0603] According to a further embodiment, the present invention provides the use as defined in any of the above, wherein said variant comprises at least 90% sequence similarity to the corresponding SEQ ID nucleotide sequence.

[0604] According to a further embodiment, the present invention provides the use as defined in any of the above, wherein at least 5.5%, such as at least 10%, 20%, 30%, 40%, 50%, 60%, 70%, 80%, at least 90% or 100% of said P. persimilis predatory individuals of said population comprise said at least one SNP marker.

[0605] According to a further embodiment, the present invention provides the use as defined in any of the above, wherein the rearing population of P. persimilis predatory mite individuals is characterized by a daily reproduction rate (λ) of above 1.06, preferably in the range of 1.10-1.40, such as 1.15-1.40, 1.20-1.40, 1.25-1.40, 1.30-1.40, or 1.10-1.35, 1.10-1.30, 1.10-1.25, 1.10-1.20, while preying on a non-Tetranychid arthropod as a food source, preferably on an immobilized non-Tetranychid arthropod prey, such as on an Astigmatid prey, most preferably on an immobilized Astigmatid prey.

[0606] According to a further embodiment, the present invention provides use of a nucleic acid sequence selected from SEQ ID NO:1 to SEQ ID NO:28 or a portion thereof to identify Phytoseiulus persimilis (P. persimilis) predatory mite individuals characterized by improved rearing properties on a non-Tetranychid arthropod prey as a factitious host, preferably on an immobilized non-Tetranychid arthropod prey, such as on an Astigmatid prey, most preferably on an immobilized Astigmatid prey, as compared to Phytoseiulus persimilis (P. persimilis) predatory mite individuals lacking the at least one sequence.

[0607] According to a further embodiment, the present invention provides the use as defined in any of the above, wherein the improved rearing properties on a non-Tetranychid arthropod prey are selected from the following parameters: increased daily reproduction rate (λ), increased daily oviposition rate, increased survival rate, lower mortality rate, increased juvenile and/or female survival rate, increased percentage of female individuals reproducing on said prey, and improved or similar predatory behavior towards a Tetranychid species, as compared to a population of P. persimilis individuals lacking the at least one SNP and or the polynucleotide sequence selected from SEQ ID NO:1 to SEQ ID NO:28.

[0608] According to a further embodiment, the present invention provides an isolated nucleic acid primer pair sequence comprising at least 90% similarity to a polynucleotide sequence selected from SEQ ID NO:29 to SEQ ID NO:83 and any combination thereof.

[0609] According to a further embodiment, the present invention provides use of the isolated nucleic acid primer pair sequence as defined above, for identifying and/or selecting and/or obtaining Phytoseiulus persimilis (P. persimilis) predatory mite individual characterized by improved rearing properties on a non-Tetranychid arthropod prey as a factitious host, preferably on an immobilized non-Tetranychid arthropod prey, such as on an Astigmatid prey, most preferably on an immobilized Astigmatid prey, and/or for obtaining the Phytoseiulus persimilis (P. persimilis) predatory mite population as defined in any of the above, or mite individual as defined in any of the above.

[0610] Descriptions of embodiments of the invention in the present application are provided by way of example and are not intended to limit the scope of the invention. The described embodiments comprise different features, not all of which are required in all embodiments. Some embodiments utilize only some of the features or possible combinations of the features. Variations of embodiments of the invention that are described, and embodiments comprising different combinations of features noted in the described embodiments, will occur to a person having ordinary skill in the art. Unless explicitly stated, the method embodiments described herein are not constrained to a particular order in time or chronological sequence. Additionally, some of the described method elements may be skipped, or they may be repeated, during a sequence of operations of a method.

[0611] In order to understand the invention and to see how it may be implemented in practice, a plurality of preferred embodiments will now be described, by way of non-limiting example only, with reference to the following examples.

### Example 1

Identification of Genetic Markers Unique for P. persimilis Populations with the Trait of Improved Rearing Properties on a Non-Tetranychid Arthropod Prey

[0612] In this example, the genetic profile of P. persimilis population reared upon its natural Tetranychid prey (i.e. spider mites) (P−), was compared to the P. persimilis population of the present invention reared and reproduced on non-Tetranychid arthropod prey after selective breeding, preferably on Astigmatid prey such as C. lactis (P+).

### 1. Reference Genome Assembly:

[0613] A. Sample collection: For the purpose of assembling the genome (de novo genome assembly), it was aimed to obtain a population with low genetic variability. This was obtained by forcing sib mating for consecutive generations—Females originating from a P+ population were isolated and allowed to oviposit, then removed from their offspring. The offspring were allowed to mate with their siblings, and then an individual female was isolated to repeat the procedure. This was repeated for 15 generations. One resulting female of this process was the founder of a population that was maintained on frozen C. lactis as food for 9 months. A sample of this population was collected from the rearing.
[0614] B. Genomic DNA isolation protocol: The sampled population was subdivided to pools of ˜300 individuals. In total 3 pools were treated. Each pool was subjected to genomic DNA extraction. The QIAGEN DNeasy® Blood & Tissue Kit was used for DNA extraction according to manufacturer instructions with a modification: prior to incubation, samples were lysed using a mechanical homogenizer. Following extraction, an additional step of RNA degradation was done using ZYMO RESEARCH RNase A according to manufacturer instructions. Finally, extracts of the pools were joined and concentrated using the Genomic DNA Clean & Concentrator™-25 (ZYMO RESEARCH) according to manufacturer instructions. DNA quality and quantity were verified by automated electrophoresis, and Fluorescence-based quantification, respectively.
[0615] C. Genomic DNA library preparation and sequencing: Genomic DNA library preparation and sequencing were performed at GENEWIZ Inc. (NJ, USA). Illumina compatible paired-end library preparation and sequencing. Genomic DNA was fragmented and used for library preparation using Illumina Compatible Paired-End Sequencing kit. Libraries were sequenced on an Illumina HiSeq platform using High Output mode with a 2×150 PE sequencing configuration. In total, 81,229,004 pair-end reads were produced (24 Giga base of data). With mean quality score of 35.77 (Phred score scale).
[0616] D. Assembly of reference genome: SOAPdenovo v2.41, de-novo assembler, was used for de-novo assembly using the sequenced data as input. De-novo assembled genome was created with a minimum contig length of 1000 bp. QUAST was used to generate statistics for the de-novo assembled genome. The total length of the assembly was 167,708,956 bases (15,621 contigs; N50 of contig length was 68,160 bases). BUSCO was used to assess the assembly quality based on representation of an array of arthropods-typical single-copy genes (https://academic.oup.com/bioinformatics/article/31/19/3210/211866). BUSCO analysis indicated 72% completeness for the assembled genome.

### 2. Identification of P+ Specific Genetic Markers:

[0617] In order to identify genetic markers specific to P+ line, a variant calling strategy was applied as follows:
[0618] A. P. persimilis populations sampling: Sixteen different P. persimilis populations were sampled; three represented P+ line (One population that went through the sib-mating procedure described in section 1 above, and two P+ populations obtained as described in WO 20121/044404 incorporated herein by its entirety), and thirteen populations represented the traditional, conventionally reared P− line. The P− populations were not applied to the P+ breeding and selection processes, and represent a range of different commercial producers/populations, and geographic origins. From each population, 100-300 specimens were collected.
[0619] B. Genomic DNA extraction and high-throughput sequencing: Genomic DNA from each of the different populations was isolated in the method described in section 1b with the exception that no pooling of DNA from multiple sub samples was required. Library preparation and sequencing was done using the same methodology described in section 1c. In total, 2,895 million pair-end reads were sequenced (868 Giga base of data) with average read pairs per sample of 193 million. This sequencing depth corresponds to an ≥300 average coverage of the assembled genome. This allows for detailed depiction of genetic variants at the population level.
[0620] C. Variant calling: Data analysis for SNP/INDEL was performed using DRAGEN pipeline (https://genomemedicine.biomedcentral.com/articles/10.1186/si3073-015-0221-8). The DRAGEN (Dynamic Read Analysis for GENomics) platform is based on the highly reconfigurable DRAGEN Bio-IT Processor. The DRAGEN platform provides hardware-accelerated implementations of genome pipeline algorithms, including variant calling. The DRAGEN platform is optimized to handle Illumina HiSeq High data to detect comprehensively and accurately genomic variants including single nucleotide variants (SNV) and large INDELs with an option for accelerated GATK (Genome Analysis Toolkit). The P+ assembled draft genome was used as reference input and the sixteen samples' data sets were mapped to it. Following, variants were detected and analyzed.
[0621] D. Selection of P+ genetic markers: Following mapping and variant calling, a set of criteria were used in order to select for genetic markers unique to the P+ populations line. Those included:
   [0622] high quality score for the base called in the position (QUAL>99), high coverage of the variant in all populations (n>50; N>700),
   [0623] zero occurrence of the reference allele in non-P+ populations (13 populations), i.e., the reference allele, representing P+ genome was not found even once in any of the other populations, and,
   [0624] the reference allele is the designated allele in all tested P+ populations (three populations). Based on these criteria, a set of 34 P+ genetic markers was defined.
      3. Listing of genetic markers specific to P. persimilis line (P+):

[0625] Based on the above, a list of genetic markers unique to the P+ line of P. persimilis was generated and provided herewith (see Tables 1-3). Table 1 lists the details of each of the 34 genetic markers unique to P+ line of P. persimilis in contig-level.

TABLE 1
List of unique genetic markers identified
for P+ line positioned in contig-level

| | | Genomic | | Marker |
|---|---|---|---|---|
| | Contig SEQ | marker | Position in | allele |
| Contig name | ID No. | name | contig | (P+) |
| PP534_contig_2906 | 84 | SNP1 | 34739 | G |
| PP534_contig_4004 | 85 | SNP2 | 105452 | C |
| PP534_contig_4004 | 85 | SNP3 | 109775 | G |
| PP534_contig_4004 | 85 | SNP4 | 115020 | A |
| PP534_contig_4004 | 85 | SNP5 | 115073 | T |
| PP534_contig_4004 | 85 | SNP6 | 125940 | C |
| PP534_contig_4004 | 85 | SNP7 | 131548 | G |
| PP534_contig_4004 | 85 | SNP8 | 131555 | G |
| PP534_contig_11764 | 86 | SNP9 | 99333 | A |
| PP534_contig_11764 | 86 | SNP10 | 99595 | G |
| PP534_contig_11764 | 86 | SNP11 | 99605 | T |
| PP534_contig_11764 | 86 | SNP12 | 115325 | A |
| PP534_contig_11764 | 86 | SNP13 | 115354 | C |
| PP534_contig_11839 | 87 | SNP14 | 4508 | A |
| PP534_contig_11839 | 87 | SNP15 | 11697 | A |
| PP534_contig_11839 | 87 | SNP16 | 12229 | C |
| PP534_contig_11839 | 87 | SNP17 | 13135 | A |
| PP534_contig_11839 | 87 | SNP18 | 32979 | C |
| PP534_contig_11839 | 87 | SNP19 | 38081 | G |
| PP534_contig_11839 | 87 | SNP20 | 38220 | C |
| PP534_contig_12109 | 88 | SNP21 | 30913 | A |
| PP534_contig_12109 | 88 | SNP22 | 34950 | C |
| PP534_contig_12109 | 88 | SNP23 | 38409 | C |
| PP534_contig_12109 | 88 | SNP24 | 38458 | A |
| PP534_contig_12109 | 88 | SNP25 | 42427 | T |
| PP534_contig_12109 | 88 | SNP26 | 42604 | G |
| PP534_contig_12109 | 88 | SNP27 | 43158 | T |
| PP534_contig_12116 | 89 | SNP28 | 1032 | G |
| PP534_contig_12321 | 90 | SNP29 | 173977 | A |
| PP534_contig_12321 | 90 | SNP30 | 228195 | T |
| PP534_contig_12532 | 91 | SNP31 | 857 | C |
| PP534_contig_12532 | 91 | SNP32 | 15689 | T |
| PP534_contig_12532 | 91 | SNP33 | 40135 | C |
| PP534_contig_12532 | 91 | SNP34 | 49492 | G |

[0626] Genomic regions (reference sequences) of P. persimilis P+ line containing the genomic marker sites: In order to enable accurate comparison of any given P. persimilis population, to the P+ line, genomic sequences corresponding to the regions containing the genomic markers discovered by the present invention, are provided herein. These sequences are derived from the draft genome assembly referred to in section 1. Genomic regions for P. persimilis reference sequence containing P+ line specific markers, are set forth in SEQ ID NO:1-28 (see Table 2).

[0627] P+ line genomic regions containing markers nomenclature: Each genomic region containing a unique marker is denoted by a unique name that included the marker number (SNP01 to SNP34), the name of the contig in the reference genome assembly detailed in Table 1, the position of the marker along the contig (numerical value), and the reference and alternative (containing the unique P+ line SNP) allele bases. See an example of genomic region containing markers denomination presented in FIG. 1.

TABLE 2
List of unique genetic markers identified for P+ line in genomic regions- level

| | | Genomic | | Position | |
|---|---|---|---|---|---|
| Genomic | | region | Genomic | in | Marker |
| marker | | SEQ | region | Genomic | allele |
| name | Genomic region name | ID NO. | length | region | (P+) |
| SNP1 | SNP1_PP534_contig_2906_34739_G-A | SEQ ID | 1742 | 163 | G |
| | | NO: 1 | | | |
| SNP2 | SNP2_PP534_contig_4004_105452_C-T | SEQ ID | 778 | 181 | C |
| | | NO: 2 | | | |
| SNP3 | SNP3_PP534_contig_4004_109775_G-A | SEQ ID | 1818 | 197 | G |
| | | NO: 3 | | | |
| SNP4 | SNP4_PP534_contig_4004_115020_A-G \| | SEQ ID | 1560 | 111 | A |
| | SNP5_PP534_contig_4004_115073_T-C | NO: 4 | | | |
| SNP5 | SNP4_PP534_contig_4004_115020_A-G \| | SEQ ID | 1560 | 165 | T |
| | SNP5_PP534_contig_4004_115073_T-C | NO: 4 | | | |
| SNP6 | SNP6_PP534_contig_4004_125940_C-G | SEQ ID | 652 | 193 | C |
| | | NO: 5 | | | |
| SNP7 | SNP7_PP534_contig_4004_131548_G-A \| | SEQ ID | 968 | 186 | G |
| | SNP8_PP534_contig_4004_131555_G-A | NO: 6 | | | |
| SNP8 | SNP7_PP534_contig_4004_131548_G-A \| | SEQ ID | 968 | 193 | G |
| | SNP8_PP534_contig_4004_131555_G-A | NO: 6 | | | |
| SNP9 | SNP9_PP534_contig_11764_99333_A-G | SEQ ID | 533 | 161 | A |
| | | NO: 7 | | | |
| SNP10 | SNP10_PP534_contig_11764_99595_G-A \| | SEQ ID | 890 | 203 | G |
| | SNP11_PP534_contig_11764_99605_T-G | NO: 8 | | | |
| SNP11 | SNP10_PP534_contig_11764_99595_G-A \| | SEQ ID | 890 | 213 | T |
| | SNP11_PP534_contig_11764_99605_T-G | NO: 8 | | | |
| SNP12 | SNP12_PP534_contig_11764_115325_A-G \| | SEQ ID | 1652 | 163 | A |
| | SNP13_PP534_contig_11764_115354_C-T | NO: 9 | | | |
| SNP13 | SNP12_PP534_contig_11764_115325_A-G \| | SEQ ID | 1652 | 192 | C |
| | SNP13_PP534_contig_11764_115354_C-T | NO: 9 | | | |
| SNP14 | SNP14_PP534_contig_11839_4508_A-G | SEQ ID | 3251 | 208 | A |
| | | NO: 10 | | | |
| SNP15 | SNP15_PP534_contig_11839_11697_A-G | SEQ ID | 1541 | 199 | A |
| | | NO: 11 | | | |
| SNP16 | SNP16_PP534_contig_11839_12229_C-T | SEQ ID | 1076 | 266 | C |
| | | NO: 12 | | | |
| SNP17 | SNP17_PP534_contig_11839_13135_A-T | SEQ ID | 1495 | 216 | A |
| | | NO: 13 | | | |
| SNP18 | SNP18_PP534_contig_11839_32979_C-G | SEQ ID | 2397 | 187 | C |
| | | NO: 14 | | | |
| SNP19 | SNP19_PP534_contig_11839_38081_G-A | SEQ ID | 1565 | 279 | G |
| | | NO: 15 | | | |
| SNP20 | SNP20_PP534_contig_11839_38220_C-G | SEQ ID | 1402 | 188 | C |
| | | NO: 16 | | | |
| SNP21 | SNP21_PP534_contig_12109_30913_A-G | SEQ ID | 1704 | 165 | A |
| | | NO: 17 | | | |
| SNP22 | SNP22_PP534_contig_12109_34950_C-A | SEQ ID | 1938 | 183 | C |
| | | NO: 18 | | | |
| SNP23 | SNP23_PP534_contig_12109_38409_C-T \| | SEQ ID | 1471 | 133 | C |
| | SNP24_PP534_contig_12109_38458_A-T | NO: 19 | | | |
| SNP24 | SNP23_PP534_contig_12109_38409_C-T \| | SEQ ID | 1471 | 182 | A |
| | SNP24_PP534_contig_12109_38458_A-T | NO: 19 | | | |
| SNP25 | SNP25_PP534_contig_12109_42427_T-C \| | SEQ ID | 2196 | 146 | T |
| | SNP26_PP534_contig_12109_42604_G-A | NO: 20 | | | |
| SNP26 | SNP25_PP534_contig_12109_42427_T-C \| | SEQ ID | 2196 | 323 | G |
| | SNP26_PP534_contig_12109_42604_G-A | NO: 20 | | | |
| SNP27 | SNP27_PP534_contig_12109_43158_T-G | SEQ ID | 2298 | 241 | T |
| | | NO: 21 | | | |
| SNP28 | SNP28_PP534_contig_12116_1032_G-A | SEQ ID | 1941 | 236 | G |
| | | NO: 22 | | | |
| SNP29 | SNP29_PP534_contig_12321_173977_A-C | SEQ ID | 2018 | 199 | A |
| | | NO: 23 | | | |
| SNP30 | SNP30_PP534_contig_12321_228195_T-C | SEQ ID | 1779 | 185 | T |
| | | NO: 24 | | | |
| SNP31 | SNP31_PP534_contig_12532_857_C-G | SEQ ID | 2654 | 158 | C |
| | | NO: 25 | | | |
| SNP32 | SNP32_PP534_contig_12532_15689_T-C | SEQ ID | 2094 | 143 | T |
| | | NO: 26 | | | |
| SNP33 | SNP33_PP534_contig_12532_40135_C-T | SEQ ID | 2280 | 157 | C |
| | | NO: 27 | | | |
| SNP34 | SNP34_PP534_contig_12532_49492_G-A | SEQ ID | 1932 | 161 | G |
| | | NO: 28 | | | |

### 4. Assay for High-Throughput Sequencing-Based Verification:

[0628] An assay that enables the identification of alleles for the genetic markers in P. persimilis population is here detailed. This assay was calibrated and is relevant to population level assessment of allele status using samples of specimens that are equal or greater than 100 individuals.
[0629] A. Sample collection: Living samples of P. persimilis populations should be collected and stored in clean, dry and sealed receptacle, such as an Eppendorf tube. Samples should be either processed immediately or kept frozen at −70° C. or below until processing. Any treatment or handling of the sample that may damage the integrity of the sample and, specifically of DNA should be avoided. These include but are not limited to heating, UV irradiation, and emersion in bioactive liquids among other.
[0630] B. Genomic DNA isolation: The protocol specified in section 1b should be followed. The minimal quantity of genomic DNA required for continuation of the assay is 500 ng in total, as measured by fluorescence-based quantification (e.g., QuBit 3.0 instrument, ds-DNA assay kit), but preferably quantity would be above 1 μg of genomic DNA. The quality of genomic DNA extract should be tested by automated electrophoresis (e.g., TapeStation system, Agilent, CA, USA) and verified to be above DIN value of 8.0.
[0631] C. Genomic DNA library preparation and sequencing: Genomic DNA library should be prepared (e.g. using Illumina-compatible library preparation kits). Libraries quality should be verified before sequencing. Sequencing of ≥20 Giga bases of sequence per population (e.g. enabled by Illumina sequencing platform), allowing for ˜ 100 fold average coverage of the genome (based on an estimate of 160-180 M bp genome size) should be performed. Quality of the resulting sequences should be verified (e.g., by FastqC analysis).
[0632] D. Determination of allele status: The sequence data presented in Table 1 (SEQ ID NO:84-91) should be used as a reference for processing. Sequence data obtained for the tested population should be mapped to this reference sequence using designated tools such as Bowtie2 (https://www.nature.com/articles/nmeth.1923) or HISAT (https://www.nature.com/articles/nmeth.3317 #:˜:text=HISAT %20(hierarchical%20indexing%20for%20spliced,reads %20from%20RNA%20sequencing%20experiments). Mapping results should be formatted and viewed and inspected using a genome viewer such as IGV (https://cancerres.aacrjournals.org/content/77/21/e31.long). Variant statistics can be achieved automatically using GATK tools (https://www.biorxiv.org/content/10.1101/201178v3).

### 5. Assay for Sanger Sequencing-Based Verification:

[0633] An assay that enables the identification of alleles of the genetic markers in P. persimilis population is here detailed. This assay was calibrated and is relevant for individual specimen level assessment of allele status. In general, in the assay, DNA of individual mites from different populations was amplified by PCR using the specific primers for each marker. The product was sequenced and compared to the reference genome to assure the predicted SNPs are found.
[0634] A. Sample collection: Living samples of P. persimilis populations should be collected and stored in clean, dry and sealed receptacle, such as an Eppendorf tube. Samples should be either processed immediately or kept frozen at −70° C. or below until processing. Any treatment or handling of the sample that may damage the integrity of the sample and, specifically of DNA should be avoided. These include but are not limited to heating, UV irradiation, and emersion in bioactive liquids among other.
[0635] B. Genomic DNA isolation: Mites were squashed in 35 μl lysis buffer (5 mM Tris pH8, 0.5 mM EDTA pH8, 0.5% IGEPAL, 1 mg Proteinase K) and incubated at 65° C. for 15 minutes followed by 95° C. for 10 minutes.
[0636] C. Polymerase change reaction (PCR) amplification of target regions and sequencing: A set of PCR primers was designed in order to enable amplification of genomic regions containing a single or multiple sites of P+ line genomic markers. Table 3 contains the list of targets and respective primer pairs and their specifications (within the table, F denotes forward primer and R denotes reverse primer). PCR amplification was conducted using amplification enzyme (polymerase) with High-fidelity properties, such as Takara PrimeSTAR Max DNA Polymerase. Following successful amplification of specific fragments of denoted size, amplicons were sequenced using the Sanger methodology. Resulting sequences were inspected for quality.
[0637] D. Determination of allele status: Resulting high-quality sequences have been aligned to the reference sequences listed in Table 2 (SEQ ID NO:1-28). Following alignment, allele status have been determined by inspecting the nucleotide sequence at the position of the genomic marker. It was found that the genetic markers unique to P+ line were verified as such within individual specimens. In other words, alleles containing P+ specific genomic markers (i.e. SEQ ID NO:1-28) were verified at the single mite level of P. persimilis P+ populations. These markers were not found in non-P+P. persimilis populations (P− populations).

TABLE 3
List of primer pairs for the amplification by polymerase chain reaction of
genomic regions containing P+ line specific genomic markers

| | | | | Product |
|---|---|---|---|---|
| Primer | | | Template | length |
| pair name | Primer SEQ ID NO. and Sequence (5′→3′) | | strand | (bp) |
| SNP_1 | F | CCCTGACCATCGGTTCTCAC | Plus | 1718 |
| | SEQ ID NO: 29 | | | |
| | R | TATCTCTTTCAGTCAGTTCCTATGC | Minus | |
| | SEQ ID NO: 30 | | | |
| SNP_2 | F | GTCTAACACAGAGCGGGCAT | Plus | 759 |
| | SEQ ID NO: 31 | | | |
| | R | GTGGAAACTCCGATGCTGGA | Minus | |
| | SEQ ID NO: 32 | | | |
| SNP_3 | F | GAACGAGGCTCCGTGTACTT | Plus | 1799 |
| | SEQ ID NO: 33 | | | |
| | R | TCTGTGTTTACCTGCCCGTC | Minus | |
| | SEQ ID NO: 34 | | | |
| SNP_4-5 | F | AGGTGTCCGCCAATGGAATC | Plus | 1541 |
| | SEQ ID NO: 35 | | | |
| | R | ACGGGAGACTTGGGCTATCT | Minus | |
| | SEQ ID NO: 36 | | | |
| SNP_6 | F | ACACGGAACCATCCCATCAG | Plus | 633 |
| | SEQ ID NO: 37 | | | |
| | R | TGGAAGAAAGTCAGGTCGCC | Minus | |
| | SEQ ID NO: 38 | | | |
| SNP_7-8 | F | ACTCCTGGTCCCTGTCTCTC | Plus | 949 |
| | SEQ ID NO: 39 | | | |
| | R | GCTGAATAGCCGCTCCGTAT | Minus | |
| | SEQ ID NO: 40 | | | |
| SNP_9 | F | AACGCTTCCAGACCCTCATC | Plus | 514 |
| | SEQ ID NO: 41 | | | |
| | R | TTTCGGAAGAACGCGACAGA | Minus | |
| | SEQ ID NO: 42 | | | |
| SNP_10-11 | F | TCACTTCACTGTGCTGAGGC | Plus | 871 |
| | SEQ ID NO: 43 | | | |
| | R | CGCTAGTTTTGCATCCTCGC | Minus | |
| | SEQ ID NO: 44 | | | |
| SNP_12-13 | F | GCGGAGAGAGCTGGAATCTC | Plus | 1633 |
| | SEQ ID NO: 45 | | | |
| | R | TGCAGTCTCGAAGCGAAGTT | Minus | |
| | SEQ ID NO: 46 | | | |
| SNP_14 | F | AGTCCCCTTTACTACCCGCT | Plus | 3232 |
| | SEQ ID NO: 47 | | | |
| | R | TGAAGTTTCGCAGGTTCGTG | Minus | |
| | SEQ ID NO: 48 | | | |
| SNP_15-16 | F | AACGAAGCTAGATCGGCTGG | Plus | 1522 |
| | SEQ ID NO: 49 | | | |
| | R | CGGCTGGCATTTTGGCTATC | Minus | |
| | SEQ ID NO: 50 | | | |
| SNP_16 | F | CGAGCATTGGGTGAGAGCAT | Plus | 1057 |
| | SEQ ID NO: 51 | | | |
| | R | CGGCTGGCATTTTGGCTATC | Minus | |
| | SEQ ID NO: 50 | | | |
| SNP_17 | F | CGAAGTGAGCCCGATCCAAA | Plus | 1476 |
| | SEQ ID NO: 52 | | | |
| | R | TCAAACTCCCCCTCGTTTCG | Minus | |
| | SEQ ID NO: 53 | | | |
| SNP_18 | F | TTAGTCTACGGCTGCTCACG | Plus | 2378 |
| | SEQ ID NO: 54 | | | |
| | R | CCATACTCTTCGCTCGCCAT | Minus | |
| | SEQ ID NO: 55 | | | |
| SNP_19 | F | GCTCGGGAGTTCGAGCATAC | Plus | 1546 |
| | SEQ ID NO: 56 | | | |
| | R | TGCGTTTGAGTGGAATCCGA | Minus | |
| | SEQ ID NO: 57 | | | |
| SNP_20 | F | TCACGGTGCGACTTCCATTC | Plus | 1383 |
| | SEQ ID NO: 58 | | | |
| | R | TCCAAAACCGTCGCTCAAGA | Minus | |
| | SEQ ID NO: 59 | | | |
| SNP_21 | F | CTCGACAAAGTGCCGTCTGA | Plus | 1685 |
| | SEQ ID NO: 60 | | | |
| | R | AGCAATAAGGGGGACACAGC | Minus | |
| | SEQ ID NO: 61 | | | |
| SNP_22 | F | GCTCATGTCGAGGCTCTCTC | Plus | 1919 |
| | SEQ ID NO: 62 | | | |
| | R | ATAGGGTTCGGAGTTCGGGA | Minus | |
| | SEQ ID NO: 63 | | | |
| SNP_23-24 | F | GTGTGGTTGTCACAGGGGAT | Plus | 1452 |
| | SEQ ID NO: 64 | | | |
| | R | CTAGGTGAGTCGATGGCGTC | Minus | |
| | SEQ ID NO: 65 | | | |
| SNP_25-26 | F | GGCGATACAGACAACGCTCT | Plus | 2177 |
| | SEQ ID NO: 66 | | | |
| | R | GTACCCGCGAATCGTAGGAG | Minus | |
| | SEQ ID NO: 67 | | | |
| SNP_27 | F | CTGTCGCACACGAGGAGATA | Plus | 2279 |
| | SEQ ID NO: 68 | | | |
| | R | CTCAGAGGTTGCTGGAAGGG | Minus | |
| | SEQ ID NO: 69 | | | |
| SNP_28 | F | GGTGCTCGCTTTCGCTATTG | Plus | 1922 |
| | SEQ ID NO: 70 | | | |
| | R | TTTCACGGGGCTACATTGCT | Minus | |
| | SEQ ID NO: 71 | | | |
| SNP_29 | F | TCGCCTGAGAGAGGTACTGG | Plus | 1999 |
| | SEQ ID NO: 72 | | | |
| | R | GAGGGACGCAGTGGAATCAA | Minus | |
| | SEQ ID NO: 73 | | | |
| SNP_30 | F | CTGGGATTCGCTGCTCTGTT | Plus | 1760 |
| | SEQ ID NO: 74 | | | |
| | R | TTCTCAGAGGCGCTCGATTC | Minus | |
| | SEQ ID NO: 75 | | | |
| SNP_31 | F | ACTCGGCGAATCCTACGAAC | Plus | 2635 |
| | SEQ ID NO: 76 | | | |
| | R | ACAAGGTGCCGGAATCACAT | Minus | |
| | SEQ ID NO: 77 | | | |
| SNP_32 | F | TAGCATAACTGACCAGCCGC | Plus | 2075 |
| | SEQ ID NO: 78 | | | |
| | R | TCTCGGCTAATCCGCATGAC | Minus | |
| | SEQ ID NO: 79 | | | |
| SNP_33 | F | GCAGCCAGATATACCGCGAA | Plus | 2261 |
| | SEQ ID NO: 80 | | | |
| | R | TTGCGAGTTTTTCCACAGCG | Minus | |
| | SEQ ID NO: 81 | | | |
| SNP_34 | F | GGTCACGCCGAATTTGTGTC | Plus | 1913 |
| | SEQ ID NO: 82 | | | |
| | R | GAGGCAGACCAACTGGAGAC | Minus | |
| | SEQ ID NO: 83 | | | |

[0638] As shown above, the newly identified genetic markers of the present invention (SNP1-34) are highly informative, e.g. according to the polymorphism information content (PIC) index, and/or unique for P+P. persimilis populations/individual mites of the present invention, characterized by improved rearing properties on a non-Tetranychid arthropod prey, e.g. Astigmata prey species, preferably immobilized Astigmata prey species, such as immobilized C. lactis.

[0639] It is herein demonstrated that the genetic markers and sequences provided by the present invention (SEQ ID NO:1-91) are useful for producing, identifying and selecting P. persimilis predatory mites that have the advantageous trait of effectively developing and reproducing on a non-Tetranychid arthropod prey (e.g. an immobilized Astigmata prey species), over P. persimilis absent of these genetic markers, traditionally grown on its natural Tetranychid prey (spider mites).

[0640] In addition, it is shown by the present invention that the protocol herein established for the first time, for identifying the novel and unique genomic markers within P. persimilis (P+) genome, is robust and that the resulted genomic markers and sequences identified via this protocol are also robust and can identify and select for P. persimilis predatory mites that have the advantageous trait of effectively developing and reproducing a on non-Tetranychid arthropod prey, such as an Astigmata prey species.

[0641] The genetic profiling results of the present invention summarized in Tables 1 and 2 (and primer sequences for identifying the genetic markers in Table 3) present newly identified haplotypes comprising combinations of genetic variants depicted in these tables. The haplotype combinations are unique for and associated with the P+P. persimilis population type. The newly identified genetic variants can be used to produce, identify, detect, select and/or screen for the P+ population which exhibits significantly improved development and reproduction parameters preying on Astigmatid species, as compared with non-P+ population (P− population), which is absent of this allelic haplotype combination. These reproduction parameters may include increased reproduction rate, increased oviposition rate and high percentage of female individuals capable of development and reproduction on the non-Tetranychid arthropod prey, and enhanced juvenile and adult female survival rate. The selected P. persimilis population of the present invention exhibits a similar and even improved ability to control their natural prey, spider mites.

[0642] To conclude, the present invention provides for the first time genomic biomarkers associated with the trait of increased reproduction rate of P. persimilis population on an alternative diet of non-Tetranychid arthropod prey, preferably Astigmatid mites such as C. lactis. This enables the production and identification of P. persimilis predatory mites characterized by a highly desirable, revolutionary, indoor rearing, exhibiting increased yield, feeding on Astigmata species.

### Example 2

Validation of Identified Genetic Markers Associated with P. persimilis Populations Characterized by Improved Rearing Properties on Non-Tetranychid Arthropod Prey

[0643] To validate the genetic markers (SNPs) defined in Example 1, different P. persimilis populations were sampled and tested for their genetic profile using the two methods described herein above—either by population-wide high-throughput genomic DNA sequencing for all of the markers, performed on a pool from each population, or by testing individual mites from different populations by sequencing the PCR product of a selected marker. Three validations (separated by seven and six months from each other) were conducted for the population-wide high-throughput genomic DNA sequencing method, and two validations (separated by 10 months from each other), were conducted for the PCR method.

### Validation by Population-Wide High-Throughput Genomic DNA Sequencing (Population Level)

[0644] Reference is now made to Table 4, presenting rate of P+ allele in the different P. persimilis populations tested. P. persimilis populations of P+, Alternation, and P− (including ‘other producer’ population) were sampled (sampling events 1, 2 and 3). Each sample consisted of 300 individual specimens. Total DNA was extracted, sequenced by High-throughput sequencing (population-wide high-throughput genomic DNA sequencing method), and mapped to the P+ reference genome assembly. Percentage of alleles in the population that are identical to P+ were calculated and presented for the 34 P+ unique SNPs (SNP1-34, see Tables 1 and 2).

TABLE 4
Rate of P+ allele in P+, Alternation, and P− P. persimilis populations using the
population-wide high-throughput genomic DNA sequencing method
producer

| | Line | | | | | | | | | | |
|---|---|---|---|---|---|---|---|---|---|---|---|
| | | | | | | | | | | | Other |
| Sampling | P+ | | | Alternation | | P− | | | | | producer |
| event | 1 | 2 | 3 | 2 | 3 | 1 | 1 | 1 | 2 | 3 | 1 |
| SNP1 | 85.71 | 85.09 | 100 | 83.10811 | 80.00 | 1.54 | 0 | 4.94 | 1.15 | 5.15 | 4.35 |
| SNP2 | 100 | 100 | 100 | 60.80 | 73.91 | 0 | 0 | 0 | 0.68 | 0 | 1.43 |
| SNP3 | 100 | 100 | 100 | 67.02 | 82.29 | 1.67 | 0 | 0 | 1.55 | 0 | 0 |
| SNP4 | 100 | 100 | 100 | 54.73 | 81.16 | 0 | 0 | 0 | 0.66 | 0 | 0 |
| SNP5 | 100 | 100 | 100 | 58.82 | 84.00 | 0 | 0 | 0 | 0 | 0 | 0 |
| SNP6 | 89.86 | 91.34 | 100 | 66.87 | 70.45 | 0 | 0 | 0 | 0.65 | 0 | 0 |
| SNP7 | 100 | 100 | 100 | 79.41 | 80.95 | 1.47 | 1.56 | 0 | 0.79 | 0 | 0 |
| SNP8 | 100 | 100 | 100 | 78.20 | 78.05 | 0 | 0 | 0 | 0.78 | 0 | 0 |
| SNP9 | 100 | 89.23 | 100 | 85.71 | 79.71 | 0 | 0 | 0 | 0 | 0 | 1.22 |
| SNP10 | 88.71 | 100 | 91.38 | 84.75 | 60.47 | 0 | 0 | 0 | 0 | 0 | 3.03 |
| SNP11 | 86.76 | 100 | 91.67 | 85.95 | 62.79 | 0 | 0 | 0 | 0 | 0 | 0 |
| SNP12 | 80.30 | 100 | 87.63 | 81.82 | 79.41 | 0 | 0 | 1.41 | 0 | 0 | 0 |
| SNP13 | 80.56 | 100 | 86.60 | 80.31 | 81.48 | 0 | 0 | 1.23 | 0 | 0 | 0 |
| SNP14 | 100 | 100 | 100 | 86.32 | 100 | 0 | 0 | 0 | 0.71 | 0 | 0 |
| SNP15 | 100 | 100 | 100 | 88.97 | 100 | 0 | 0 | 0 | 0.67 | 0.93 | 0 |
| SNP16 | 100 | 100 | 100 | 88.24 | 100 | 0 | 0 | 0 | 2.22 | 0 | 0 |
| SNP17 | 100 | 100 | 100 | 100 | 100 | 0 | 0 | 0 | 1.56 | 0 | 0 |
| SNP18 | 100 | 89.36 | 100 | 83.46 | 86.46 | 0 | 0 | 0 | 1.04 | 0 | 0 |
| SNP19 | 100 | 100 | 100 | 89.23 | 86.17 | 0 | 0 | 0 | 0 | 0 | 1.52 |
| SNP20 | 100 | 100 | 100 | 85.35 | 100 | 0 | 1.61 | 0 | 1.33 | 0 | 1.01 |
| SNP21 | 100 | 100 | 100 | 80.95 | 85.71 | 0 | 0 | 0 | 2.54 | 0 | 0 |
| SNP22 | 100 | 100 | 100 | 76.00 | 68.75 | 4.08 | 0 | 0 | 2.48 | 0.85 | 0 |
| SNP23 | 100 | 100 | 100 | 80.67 | 74.03 | 0 | 0 | 0 | 1.92 | 1.89 | 1.32 |
| SNP24 | 100 | 100 | 100 | 77.37 | 79.73 | 0 | 0 | 0 | 1.72 | 1.96 | 1.19 |
| SNP25 | 100 | 100 | 100 | 74.24 | 83.00 | 0 | 0 | 0 | 3.55 | 1.63 | 0 |
| SNP26 | 100 | 100 | 100 | 74.10 | 87.39 | 0 | 0 | 1.47 | 3.27 | 0 | 2.30 |
| SNP27 | 100 | 100 | 100 | 78.46 | 86.52 | 0 | 0 | 0 | 0.79 | 0 | 3.33 |
| SNP28 | 100 | 100 | 100 | 87.50 | 84.88 | 2.38 | 0 | 1.02 | 1.59 | 0 | 1.19 |
| SNP29 | 80.52 | 81.48 | 87.32 | 62.20 | 67.35 | 0 | 0 | 0 | 0.81 | 0 | 0 |
| SNP30 | 79.49 | 78.29 | 84.34 | 66.00 | 57.53 | 0 | 1.72 | 0 | 1.68 | 0 | 0 |
| SNP31 | 100 | 100 | 100 | 76.71 | 74.36 | 0 | 1.59 | 0 | 0.76 | 0 | 0 |
| SNP32 | 100 | 100 | 100 | 67.97 | 75.29 | 0 | 0 | 0 | 1.32 | 0 | 0 |
| SNP33 | 100 | 100 | 100 | 75.00 | 83.33 | 0 | 0 | 0 | 2.61 | 0 | 1.09 |
| SNP34 | 100 | 85.95 | 100 | 74.15 | 80.99 | 0 | 0 | 0 | 0.69 | 0 | 0 |
| Max % ref | 100 | 100 | 100 | 100 | 100 | 4.08 | 1.72 | 4.94 | 3.55 | 5.15 | 4.35 |

[0645] As can be seen, the maximum percentage of identity to the P+ reference allele, in the P− population (incl. other producer P− population), was 5.15% (SNP1). While, the minimum percentage of identity to the P+ reference allele in the P+ examined populations was 80.30% (SNP12). This significant and clear difference shows the uniqueness of the SNPs found by the inventors to the P+ type population, and that they are highly informative and can effectively differentiate between P+ (having the trait of improved rearing on non-Tetranychid arthropod prey) and P− (lacking the trait) populations. With respect to the Alternation population, the minimum identity to the P+ reference allele was 60.47 (SNP10). This value is closer to the P+ type population, and shows that although percentage of the unique SNPs is slightly lower, this population, exposed to alternation of food source, encompass and exhibits the trait of improved rearing on non-Tetranychid arthropod prey, associated with the herein disclosed haplotype of SNPs.

[0646] Reference is now made to FIG. 2, graphically presenting the rate of P+ allele in P. persimilis populations. Populations of P+ and P− (incl. other producer P− population) P. persimilis were sampled (sampling 1, 2 and 3). Each sample consisted of 300 individual specimens. Total DNA was extracted, sequenced by High-throughput sequencing (population-wide high-throughput genomic DNA sequencing method) and mapped to the P+ reference genome assembly. Each dot represents an allele (SNP). Dots of different symbols represent different populations at the same sampling date. Dotted line represents cutoff for identification as P+ (e.g. above 5%).

[0647] As can be clearly seen, the percentage of each of the P+ reference alleles (SNPs) in P− populations is about 5% or less, while the percentage of each of the P+ reference alleles in the P+ population was at least 80% or higher. In the Alternation population (P+ Alt) the percentage of the P+ allele was 60% or higher. These results demonstrate the correlation or association between the trait of improved rearing on non-Tetranychid arthropod prey (P+ population type) and each of the SNPs (alleles) herein described and any of their combination.

[0648] Reference is now made to FIG. 3, graphically alternatively presenting results of population-wide high-throughput genomic DNA sequencing of samples of different sources and different dates. In this graph, the Y axis shows the percentage of similarity to the defined P+ reference allele. The top graph part shows average results of all of the different markers tested, and in the bottom graph part, each dot represents the result for a specific marker for each sample. The X axis shows different sample times (events) and different sources.

[0649] As shown in FIG. 3, when populations were tested by population-wide high-throughput genomic DNA sequencing method, the P+ results showed almost 100% similarity to the reference allele, while P− populations (P− and ‘other producer’ sources) showed slightly higher than 0% similarity to the P+ reference allele (see FIG. 3).

[0650] With respect to a population maintained on an alternating diet (‘Alternation’ in FIG. 2, see also Example 3), it showed intermediate results, and was more similar or related to the P+ than to the P− population (about 810% similarity to the P+ reference allele, see FIG. 3).

### Validation by PCR (Individual Level)

[0651] When tested by amplifying the specific markers SNP2, SNP7 and SNP8, all P+ individuals matched the P+ alleles, while all of the P− individuals (incl. individuals sampled from ‘another producer’ source), did not match the corresponding the P+ alleles. The population maintained on an alternating diet showed, as expected, intermediate results, more closely related to the P+ population.

[0652] Reference is now made to Tables 5 and 6, presenting results of genetic similarity of different P. persimilis population types or sources to the P+ reference allele, as found by sequencing the PCR product of three different markers. Table 5 presents the percentage of mites exhibiting the same allele as the P+ reference from different sample events and different sources. Table 6 presents the number of mites individually tested from each group (sample event/source) and marker.

[0653] The results clearly show that 100% of the P+ population individuals tested has the P+ reference allele, while 0% of the tested P− population individuals has the P+ reference allele, for all three tested SNP markers. These data strengthen the informativeness and uniqueness of the genetic markers disclosed for the first time by the present invention, as associated with the P+ population trait of improved reproduction and rearing on a non-Tetranychid arthropod prey. The results obtained from individuals of the ‘Alternation’ population show that more than 60% (e.g. 60%-90%) of the tested individuals has the P+ reference allele. This implies that the ‘Alternation’ population is composed of individuals with the trait of improved rearing on a non-Tetranychid arthropod prey, and individuals absent of the trait (see Example 3).

TABLE 5
Percentage of mites exhibiting the P+ reference allele from different sample
events and different sources using the PCR method

| | Sampling event 1 | | | Sampling event 2 | | |
|---|---|---|---|---|---|---|
| Source | SNP2 | SNP7 | SNP8 | SNP2 | SNP7 | SNP8 |
| P+ | 100% | 100% | 100% | 100% | 100% | 100% |
| P− | 0% | 0% | 0% | 0% | 0% | 0% |
| Alternation | . | . | . | 67% | 90% | 90% |
| Other | 0% | 0% | . | . | . | . |
| producer | | | | | | |

TABLE 6
Number of mites individually tested for P+ reference allele from each sampling
event/source group and each marker using the PCR method

| | Sampling event 1 | | | Sampling event 2 | | |
|---|---|---|---|---|---|---|
| Source ↓ | SNP2 | SNP7 | SNP8 | SNP2 | SNP7 | SNP8 |
| P+ | 17 | 28 | 8 | 15 | 14 | 14 |
| P− | 18 | 6 | 4 | 15 | 14 | 14 |
| Alternation | 0 | 0 | 0 | 15 | 10 | 10 |
| Other | 11 | 8 | 0 | 0 | 0 | 0 |
| producer | | | | | | |

### Example 3

Rearing Success of a P. persimilis Population with Alternating Diet Between Carpoglyphus lactis (C. lactis) and Tetranychus urticae (T. urticae).

[0654] A P+ population has been reared on an alternating diet—C. lactis (as an exemplified Astigmatid prey mite species) for three months, and T. urticae for three months—these feeding regimes repeatedly alternated for many cycles. This procedure has been maintained for 4 years, after which the population's ability to be reared on C. lactis was quantified two times in comparison with the P+ populations (continuously reared on an Astigmatid prey mite species, such as C. lactis). The rearing of each population started from 1,000 individuals, and the total population was estimated 6 weeks later. A mixture from each population was weighed, and four samples containing about 50 mg each were taken, placed on a black adhesive tape and counted. Total population size was calculated according to these counts. The multiplication factor was calculated by dividing the total number of the individuals found, by 1000, giving the factor by which the population multiplied during the trial. To calculate the daily multiplication rate, Lambda, the 42^{nd} root of this calculated number was taken according to the following formula:

$$λ = \sqrt[t]{\frac{N ( t}{N ( 0 )}}$$

[0655] where λ is the daily multiplication rate, N(0) is the initial number of mites left for rearing (i.e. 1000 mites), N(t) is the total number of mites found after rearing for a 6 weeks period of time, and t=42.

[0656] Reference is now made to FIG. 4 graphically presenting Lambda values of different P+‘continuous’ and ‘Alternating’ population lines. As shown in FIG. 4, the results of the ‘Alternating’ population were lower than those maintained on C. lactis continuously (i.e. P+‘continuous’ populations), demonstrating that this population has both lower rearing/breeding capacity on C. lactis, and a lower genetic similarity to the P+ population (as shown above). The P− population, which is showed herein to have the lowest genetic similarity to P+ reference allele, possesses the lowest lambda values (not presented in the figure, demonstrated in WO2019171374 and WO2021044404 publications incorporated in their entirety).

[0657] The Lambda values and the genetic similarity to the P+ population of: (1) P− population, (2) the ‘Alternating’ population, and (3) the P+ population, are summarized in Table 7. In Table 7, the average Lambda values and the percentage of similarity to the P+ allele of 3 types of populations, namely, P+, P− and an ‘Alternating’ population, are presented.

TABLE 7
Average Lambda values and percentage of similarity to the P+ allele
of the P+, P− and ‘Alternating’ populations

| | | Percentage similarity |
|---|---|---|
| Population | Lambda | to reference P+ allele |
| P+ | 1.18 | 97.1% |
| Alternating | 1.16 | 84.3% |
| P− | 1.06 | 0.46% |

[0658] It can be seen from the table above that the higher the percentage of genetic similarity to the P+ allele was, the higher was the rearing success/rate on a non-Tetranychid arthropod prey, as reflected by the lambda value. This shows the positive correlation and association between the identified unique P+ alleles (at least one of genetic markers SNP 1-34) and the trait of P. persimilis improved rearing and reproduction on a non-Tetranychid arthropod prey.

### REFERENCES

[0659] McMurtry, J. A. & Croft, B. A. (1997). Life-styles of phytoseiid mites and their roles in biological control. Annual Review of Entomology, 42, 291-321.
[0660] MCMURTRY JAMES A., DE MORAES GILBERTO J. & SOURASSOU NAZER FAMAH (2013) Revision of the lifestyles of phytoseiid mites (Acari: Phytoseiidae) and implications for biological control strategies. Systematic & Applied Acarology 18(4): 297-320. http://dx.doi.org/10.11158/saa.18.4.1
[0661] van de Vrie, M., McMurtry J. A. & Huffaker C. B. (1972) Ecology of tetranychid mites and their natural enemies: A review: III. Biology, ecology, and pest status, and host-plant relations of tetranychids. Hilgardia 41(13):343-432.

1. A biological control composition comprising a cultivated rearing population of Phytoseiulus persimilis (P. persimilis) predatory mite individuals, and optionally a carrier material, wherein at least 5% of said P. persimilis individuals comprise within their genome at least one Single Nucleotide Polymorphism (SNP) marker selected from:
a. SNP at position 34739 of a sequence having at least 90% sequence similarity to SEQ ID NO:84 or complementary sequence thereof,
b. at least one SNP at a position selected from 105452, 109775, 115020, 115073, 125940, 131548 and 131555, of a sequence having at least 90% sequence similarity to SEQ ID NO:85 or complementary sequence thereof,
c. at least one SNP at a position selected from 99333, 99595, 99605, 115325 and 115354, of a sequence having at least 90% sequence similarity to SEQ ID NO:86 or complementary sequence thereof,
d. at least one SNP at a position selected from 4508, 11697, 12229, 13135, 32979, 38081, 38220, of a sequence having at least 90% sequence similarity to SEQ ID NO:87 r or complementary sequence thereof,
e. at least one SNP at a position selected from 30913, 34950, 38409, 38458, 42427, 42604 and 43158 of a sequence having at least 90% sequence similarity to SEQ ID NO:88 or a variant, portion or complementary sequence thereof,
f. SNP at position 1032 of a sequence having at least 90% sequence similarity to SEQ ID NO:89 or complementary sequence thereof,
g. SNP at position 173977 and/or SNP at position 228195 of a sequence having at least 90% sequence similarity to SEQ ID NO:90 or complementary sequence thereof, and
h. at least one SNP at a position selected from 857, 15689, 40135 and 49492 of a sequence having at least 90% sequence similarity to SEQ ID NO:91 or complementary sequence thereof.

2. The biological control composition according to claim 1, wherein the at least one SNP is selected from:
a. SNP of G at position 34739 of a sequence having at least 90% sequence similarity to SEQ ID NO:84 or complementary sequence thereof,
b. at least one SNP selected from C at position 105452, G at position 109775, A at position 115020, T at position 115073, C at position 125940, G at position 131548, G at position 131555, of a sequence having at least 90% sequence similarity to SEQ ID NO:85 or complementary sequence thereof,
c. at least one SNP selected from A at position 99333, G at position 99595, T at position 99605, A at position 115325, C at position 115354, of a sequence having at least 90% sequence similarity to SEQ ID NO:86 or complementary sequence thereof,
d. at least one SNP selected from A at position 4508, A at position 11697, C at position 12229, A at position 13135, C at position 32979, G at position 38081, C at position 38220 of a sequence having g at least 90% sequence similarity to SEQ ID NO:87 or complementary sequence thereof,
e. at least one SNP selected from A at position 30913, C at position 34950, C at position 38409, A at position 38458, T at position 42427, G at position 42604, T at position 43158 of a sequence having at least 90% sequence similarity to SEQ ID NO:88 or complementary sequence thereof,
f. SNP of G at position 1032 of a sequence having at least 90% sequence similarity to SEQ ID NO:89 or complementary sequence thereof,
g. SNP of A at position 173977 and/or SNP of T at position 228195 of a sequence having at least 90% sequence similarity to SEQ ID NO:90 or complementary sequence thereof, and
h. at least one SNP selected from C at position 857, T at position 15689, C at position 40135, G at position 49492 of a sequence having at least 90% sequence similarity to SEQ ID NO:91 or complementary sequence thereof.

3-5. (canceled)

6. The biological control composition according to claim 1, wherein the at least 5% of said P. persimilis predatory individuals comprise within their genome a polynucleotide genomic sequence selected from (a) at least one sequence selected from SEQ ID NO:1 to SEQ ID NO:28 and SEQ ID NO:84 to SEQ ID NO: SEQ ID NO:91, and any combination thereof.

7. The biological control composition according to claim 1, wherein the cultivated rearing population of P. persimilis predatory mite individuals is characterized by improved rearing properties on a non-Tetranychid arthropod prey as a factious host, preferably on an immobilized non-Tetranychid arthropod prey, such as on an Astigmatid prey, most preferably on an immobilized Astigmatid prey, as compared to a P. persimilis population characterized by less than 5% individuals comprising within their genome said at least one SNP marker.

8. The biological control composition according to claim 7, wherein the improved rearing properties of the cultivated rearing P. persimilis population on a non-Tetranychid arthropod prey, are selected from
a. a daily reproduction rate (A) of above 1.06, preferably in the range of 1.10-1.40, such as 1.15-1.40, 1.20-1.40, 1.25-1.40, 1.30-1.40, or 1.10-1.35, 1.10-1.30, 1.10-1.25, 1.10-1.20, while preying on a non-Tetranychid arthropod as a food source, preferably on an immobilized non-Tetranychid arthropod prey, such as on an Astigmatid prey, most preferably on an immobilized Astigmatid prey; and
b. at least one of: increased daily reproduction rate (A), increased daily oviposition rate, increased survival rate, lower mortality rate, increased juvenile and/or female survival rate, increased percentage of female individuals reproducing on said prey, and improved or similar predatory behavior towards a Tetranychid species, as compared to a population of P. persimilis individuals characterized by less than 5% individuals comprising within their genome said at least one SNP marker.

9. The biological control composition according to claim 1, wherein the composition further comprises as a food source for the P. persimilis predatory mites of the cultivated rearing population, a non-Tetranychid arthropod prey, preferably an immobilized non-Tetranychid arthropod prey, such as on an Astigmatid prey, most preferably on an immobilized Astigmatid prey comprising immobilized life stages comprising immobilized eggs.

10. The biological control composition according to claim 7, wherein the non Tetranychid non-Tertranychid arthropod prey is selected from an Astigmatid mite species, an Artemia species, species from the Phytoseiidae family, Thrips such as Frankliniella occidentalis, Tarsonemidae mite species, and lepidopteran eggs such as of Ephestia kunhiela.

11-19. (canceled)

20. A method for obtaining a biological control composition comprising a cultivated rearing population of Phytoseiulus persimilis (P. persimilis) predatory mite individuals according to claim 1, wherein said method comprises steps of:
a. providing a rearing population of a P. persimilis predatory mite species, the rearing population comprising individuals of the P. persimilis species, reared on a suitable food source for the Phytoseiulus individuals, said food source comprising a prey species selected from the Tetranychidae species;
b. providing a population of individuals of preselected non-Tetranychid arthropod species, preferably an Astigmatid mite species, most preferably an immobilized Astigmatid mite species having immobilized life stages comprising immobilized eggs;
c. rearing the P. persimilis individuals on the preselected non-Tetranychid arthropod species as a food source;
d. screening the genome of a sample of P. persimilis individuals for the presence of at least 5% of at least one SNP selected from:
i. SNP of G at position 34739 of SEQ ID NO:84 or a variant or complementary sequence thereof,
ii. at least one SNP selected from C at position 105452, G at position 109775, A at position 115020, T at position 115073, C at position 125940, G at position 131548, G at position 131555, of SEQ ID NO:85 or a variant or complementary sequence thereof,
iii. at least one SNP selected from A at position 99333, G at position 99595, T at position 99605, A at position 115325, C at position 115354, of SEQ ID NO:86 or a variant or complementary sequence thereof,
iv. at least one SNP selected from A at position 4508, A at position 11697, C at position 12229, A at position 13135, C at position 32979, G at position 38081, C at position 38220 of SEQ ID NO:87 or a variant or complementary sequence thereof,
v. at least one SNP selected from A at position 30913, C at position 34950, C at position 38409, A at position 38458, T at position 42427, G at position 42604, T at position 43158 of SEQ ID NO:88 or a variant or complementary sequence thereof,
vi. SNP of G at position 1032 of SEQ ID NO:89 or a variant or complementary sequence thereof,
vii. SNP of A at position 173977 and/or SNP of T at position 228195 of SEQ ID NO:90 or a variant or complementary sequence thereof, and
viii. at least one SNP selected from C at position 857, T at position 15689, C at position 40135, G at position 49492 of SEQ ID NO:91 or a variant or complementary sequence thereof;
e. optionally, alternatingly rearing selected Phytoseiulus individuals in a sequence of:
rearing for at least 2, such as between 5 and 50, generations while using a food source comprising the preselected non-Tetranychid arthropod species;
rearing for at least 2, such as between 5 and 50, generations while using a food source comprising the prey species selected from the Tetranychidae
screening the genome of a sample of P. persimilis individuals for the presence of at least 5% of the at least one SNP.

21-26. (canceled)

27. A method for screening for or identifying a biological control composition according to claim 1, the method comprises steps of:
a. obtaining a sample of said population of individuals, the sample preferably comprise at least 50 individuals;
b. pooling the genome said individuals and screening the pooled genome for the presence of at least 5% of at least one SNP selected from:
i. SNP of G at position 34739 of SEQ ID NO:84 or a variant or complementary sequence thereof,
ii. at least one SNP selected from C at position 105452, G at position 109775, A at position 115020, T at position 115073, C at position 125940, G at position 131548, G at position 131555, of SEQ ID NO:85 or a variant or complementary sequence thereof,
iii. at least one SNP selected from A at position 99333, G at position 99595, T at position 99605, A at position 115325, C at position 115354, of SEQ ID NO:86 or a variant or complementary sequence thereof,
iv. at least one SNP selected from A at position 4508, A at position 11697, C at position 12229, A at position 13135, C at position 32979, G at position 38081, C at position 38220 of SEQ ID NO:87 or a variant or complementary sequence thereof,
v. at least one SNP selected from A at position 30913, C at position 34950, C at position 38409, A at position 38458, T at position 42427, G at position 42604, T at position 43158 of SEQ ID NO:88 or a variant or complementary sequence thereof,
vi. SNP of G at position 1032 of SEQ ID NO:89 or a variant or complementary sequence thereof,
vii. SNP of A at position 173977 and/or SNP of T at position 228195 of SEQ ID NO:90 or a variant or complementary sequence thereof, and
viii. at least one SNP selected from C at position 857, T at position 15689, C at position 40135, G at position 49492 of SEQ ID NO:91 or a variant or complementary sequence thereof.

28. A cultivated Phytoseiulus persimilis (P. persimilis) mite individual, wherein said cultivated Phytoseiulus predatory individual comprises within its genome at least one single nucleotide polymorphism (SNP) marker selected from:
a. SNP1 at position corresponding to position 163 of a sequence comprising at least 90% sequence similarity to SEQ ID NO:1 or complementary sequence thereof,
b. SNP2 at position 181 of a sequence having at least 90% sequence similarity to SEQ ID NO:2 or complementary sequence thereof,
c. SNP3 at position 197 of a sequence having at least 90% sequence similarity to SEQ ID NO:3 or complementary sequence thereof,
d. SNP4 at position 111 and/or SNP5 at position 165 of a sequence having at least 90% sequence similarity to SEQ ID NO:4 or complementary sequence thereof,
e. SNP6 at position 193 of a sequence having at least 90% sequence similarity to SEQ ID NO:5 or complementary sequence thereof,
f. SNP7 at position 186 and/or SNP8 at position 193 of a sequence having at least 90% sequence similarity to SEQ ID NO:6 or complementary sequence thereof,
g. SNP9 at position 161 of a sequence having at least 90% sequence similarity to SEQ ID NO:7 or complementary sequence thereof,
h. SNP10 at position 203 and/or SNP11 at position 213 of a sequence having at least 90% sequence similarity to SEQ ID NO:8 or complementary sequence thereof,
i. SNP12 at position 163 and/or SNP13 at position 192 of a sequence having at least 90% sequence similarity to SEQ ID NO:9 or complementary sequence thereof,
j. SNP14 at position 208 of a sequence having at least 90% sequence similarity to SEQ ID NO:10 or complementary sequence thereof,
k. SNP15 at position 199 of a sequence having at least 90% sequence similarity to SEQ ID NO:11 or complementary sequence thereof,
l. SNP16 at position 266 of a sequence having at least 90% sequence similarity to SEQ ID NO:12 or complementary sequence thereof,
m. SNP17 at position 216 of a sequence having at least 90% sequence similarity to SEQ ID NO:13 or complementary sequence thereof,
n. SNP18 at position 187 of a sequence having at least 90% sequence similarity to SEQ ID NO:14 or complementary sequence thereof,
o. SNP19 at position 279 of a sequence having at least 90% sequence similarity to SEQ ID NO:15 or complementary sequence thereof,
p. SNP20 at position 188 of a sequence having at least 90% sequence similarity to SEQ ID NO:16 or complementary sequence thereof,
q. SNP21 at position 165 of a sequence having at least 90% sequence similarity to SEQ ID NO:17 or complementary sequence thereof,
r. SNP22 at position 183 of a sequence having at least 90% sequence similarity to SEQ ID NO:18 or complementary sequence thereof,
s. SNP23 at position 133 and/or SNP24 at position 182 of a sequence having at least 90% sequence similarity to SEQ ID NO:19 or complementary sequence thereof,
t. SNP25 at position 146 and/or SNP26 position 323 of a sequence having at least 90% sequence similarity to SEQ ID NO:20 or complementary sequence thereof,
u. SNP27 at position 241 of a sequence having at least 90% sequence similarity to SEQ ID NO:21 or complementary sequence thereof,
v. SNP28 at position 236 of a sequence having at least 90% sequence similarity to SEQ ID NO:22 or complementary sequence thereof,
w. SNP29 at position 199 of a sequence having at least 90% sequence similarity to SEQ ID NO:23 or complementary sequence thereof,
x. SNP30 at position 185 of a sequence having at least 90% sequence similarity to SEQ ID NO:24 or complementary sequence thereof,
y. SNP31 at position 158 of a sequence having at least 90% sequence similarity to SEQ ID NO: or complementary sequence thereof,
z. SNP32 at position 143 of a sequence having at least 90% sequence similarity to SEQ ID NO:26 or complementary sequence thereof,
aa. SNP33 at position 157 of a sequence having at least 90% sequence similarity to SEQ ID NO:27 or complementary sequence thereof, and
bb. SNP34 at position 161 of a sequence having at least 90% sequence similarity to SEQ ID NO:28 or complementary sequence thereof, and any combination thereof.

29. (canceled)

30. The cultivated P. persimilis mite individual according to claim 28, wherein said P. persimilis predatory individual comprising within it's genome a polynucleotide sequence selected from SEQ ID NO:1 to SEQ ID NO:28, and any combination thereof.

31. The cultivated P. persimilis mite individual according to claim 28, wherein the at least one SNP is detected using primers comprising pairs of sequences selected from:
SEQ ID NO:29 and SEQ ID NO:30 for detection of SNP1,
SEQ ID NO:31 and SEQ ID NO:32 for detection of SNP2,
SEQ ID NO:33 and SEQ ID NO:34 for detection of SNP3,
SEQ ID NO:35 and SEQ ID NO:36 for detection of SNP4-5,
SEQ ID NO:37 and SEQ ID NO:38 for detection of SNP6,
SEQ ID NO:39 and SEQ ID NO:40 for detection of SNP7-8,
SEQ ID NO:41 and SEQ ID NO:42 for detection of SNP9,
SEQ ID NO:43 and SEQ ID NO:44 for detection of SNP10-11,
SEQ ID NO:45 and SEQ ID NO:46 for detection of SNP12-13,
SEQ ID NO:47 and SEQ ID NO:48 for detection of SNP14,
SEQ ID NO:49 and SEQ ID NO:50 for detection of SNP15-16,
SEQ ID NO:51 and SEQ ID NO:50 for detection of SNP16,
SEQ ID NO:52 and SEQ ID NO:53 for detection of SNP17,
SEQ ID NO:54 and SEQ ID NO:55 for detection of SNP18,
SEQ ID NO:56 and SEQ ID NO:57 for detection of SNP19,
SEQ ID NO:58 and SEQ ID NO:59 for detection of SNP20,
SEQ ID NO:60 and SEQ ID NO:61 for detection of SNP21,
SEQ ID NO:62 and SEQ ID NO:63 for detection of SNP22,
SEQ ID NO:64 and SEQ ID NO:65 for detection of SNP23-24,
SEQ ID NO:66 and SEQ ID NO:67 for detection of SNP25-26,
SEQ ID NO:68 and SEQ ID NO:69 for detection of SNP27,
SEQ ID NO:70 and SEQ ID NO:71 for detection of SNP28,
SEQ ID NO:72 and SEQ ID NO:73 for detection of SNP29,
SEQ ID NO:74 and SEQ ID NO:75 for detection of SNP30,
SEQ ID NO:76 and SEQ ID NO:77 for detection of SNP31,
SEQ ID NO:78 and SEQ ID NO:79 for detection of SNP32,
SEQ ID NO:80 and SEQ ID NO:81 for detection of SNP33, and
SEQ ID NO:82 and SEQ ID NO:83 for detection of SNP34.

32. An isolated cell of the cultivated Phytoseiulus persimilis (P. persimilis) predatory mite according to claim 28.

33. A Phytoseiulus persimilis rearing mite population, wherein at least 5% of the population are the cultivated P. persimilis mite individuals according to claim 28.

34. (canceled)

35. The Phytoseiulus persimilis rearing mite population according to claim 33, wherein the population is characterized by improved rearing properties on a non-Tetranychid arthropod prey as a food source, preferably on an immobilized non-Tetranychid arthropod prey, such as on an Astigmatid prey, most preferably on an immobilized Astigmatid prey.

36-38. (canceled)

39. A method for controlling a pest in a crop comprising providing the crop with a Phytoseiulus persimilis rearing mite population according to claim 33.

40. A container for releasing mite individuals of a Phytoseiulus persimilis predatory mite species, holding a biological control composition according to claim 1, comprising wherein the device comprises an exit for mobile life stages of the P. persimilis predatory mite species, preferably an exit suitable for providing a sustained release of a number of mobile life stages.

41-43. (canceled)

44. A method for identifying and/or selecting Phytoseiulus persimilis (P. persimilis) predatory mite individuals according to claim 10, characterized by improved rearing properties on a non-Tetranychid arthropod prey as a food source, preferably on an immobilized non-Tetranychid arthropod prey, such as on an Astigmatid prey, most preferably on an immobilized Astigmatid prey, wherein said method comprises detecting in the genome of the P. persimilis predatory mite individuals, the presence of a genomic haplotype comprising a single nucleotide polymorphism (SNP) marker at a position corresponding to at least one of:
SNP1 at position 163 of a sequence having at least 90% sequence similarity to SEQ ID NO:1 or complementary sequence thereof,
SNP2 at position 181 of a sequence having at least 90% sequence similarity to SEQ ID NO:2 or complementary sequence thereof,
SNP3 at position 197 of a sequence having at least 90% sequence similarity to SEQ ID NO:3 or complementary sequence thereof,
SNP4 at position 111 of a sequence having at least 90% sequence similarity to SEQ ID NO:4 or complementary sequence thereof,
SNP5 at position 165 of a sequence having at least 90% sequence similarity to SEQ ID NO:4 or complementary sequence thereof,
SNP6 at position 193 of a sequence having at least 90% sequence similarity to SEQ ID NO:5 or complementary sequence thereof,
SNP7 at position 186 of a sequence having at least 90% sequence similarity to SEQ ID NO:6 or complementary sequence thereof,
SNP8 at position 193 of a sequence having at least 90% sequence similarity to SEQ ID NO:6 or complementary sequence thereof,
SNP9 at position 161 of a sequence having at least 90% sequence similarity to SEQ ID NO:7 or complementary sequence thereof,
SNP10 at position 203 of a sequence having at least 90% sequence similarity to SEQ ID NO:8 or complementary sequence thereof,
SNP11 at position 213 of a sequence having at least 90% sequence similarity to SEQ ID NO:8 or complementary sequence thereof,
SNP12 at position 163 of a sequence having at least 90% sequence similarity to SEQ ID NO:9 or complementary sequence thereof,
SNP13 at position 192 of a sequence having at least 90% sequence similarity to SEQ ID NO:9 or complementary sequence thereof,
SNP14 at position 208 of a sequence having at least 90% sequence similarity to SEQ ID NO:10 or complementary sequence thereof,
SNP15 at position 199 of a sequence having at least 90% sequence similarity to SEQ ID NO:11 or complementary sequence thereof,
SNP16 at position 266 of a sequence having at least 90% sequence similarity to SEQ ID NO:12 or complementary sequence thereof,
SNP17 at position 216 of a sequence having at least 90% sequence similarity to SEQ ID NO:13 or complementary sequence thereof,
SNP18 at position 187 of a sequence having at least 90% sequence similarity to SEQ ID NO:14 or complementary sequence thereof,
SNP19 at position 279 of a sequence having at least 90% sequence similarity to SEQ ID NO:15 or complementary sequence thereof,
SNP20 at position 188 of a sequence having at least 90% sequence similarity to SEQ ID NO:16 or complementary sequence thereof,
SNP21 at position 165 of a sequence having at least 90% sequence similarity to SEQ ID NO:17 or complementary sequence thereof,
SNP22 at position 183 of a sequence having at least 90% sequence similarity to SEQ ID NO:18 or complementary sequence thereof,
SNP23 at position 133 of a sequence having at least 90% sequence similarity to SEQ ID NO:19 or complementary sequence thereof,
SNP24 at position 182 of a sequence having at least 90% sequence similarity to SEQ ID NO:19 or complementary sequence thereof,
SNP25 at position 146 of a sequence having at least 90% sequence similarity to SEQ ID NO:20 or complementary sequence thereof,
SNP26 at position 323 of a sequence having at least 90% sequence similarity to SEQ ID NO:20 or complementary sequence thereof,
SNP27 at position 241 of a sequence having at least 90% sequence similarity to SEQ ID NO:21 or complementary sequence thereof,
SNP28 at position 236 of a sequence having at least 90% sequence similarity to SEQ ID NO:22 or complementary sequence thereof,
SNP29 at position 199 of a sequence having at least 90% sequence similarity to SEQ ID NO:23 or complementary sequence thereof,
SNP30 at position 185 of a sequence having at least 90% sequence similarity to SEQ ID NO:24 or complementary sequence thereof,
SNP31 at position 158 of a sequence having at least 90% sequence similarity to SEQ ID NO:25 or complementary sequence thereof,
SNP32 at position 143 of a sequence having at least 90% sequence similarity to SEQ ID NO:26 or complementary sequence thereof,
SNP33 at position 157 of a sequence having at least 90% sequence similarity to SEQ ID NO:27 or complementary sequence thereof,
SNP34 at position 161 of a sequence having at least 90% sequence similarity to SEQ ID NO:28 or complementary sequence thereof, and any combination thereof.

45. (canceled)

46. The method according to claim 44, wherein said Phytoseiulus predatory individual comprising a polynucleotide genomic sequence selected from SEQ ID NO:1 to SEQ ID NO:28, and any combination thereof, and/or the detection is performed using at least one primer pair selected from:
SEQ ID NO:29 and SEQ ID NO:30 for detection of SNP1,
SEQ ID NO:31 and SEQ ID NO:32 for detection of SNP2,
SEQ ID NO:33 and SEQ ID NO:34 for detection of SNP3,
SEQ ID NO:35 and SEQ ID NO:36 for detection of SNP4-5,
SEQ ID NO:37 and SEQ ID NO:38 for detection of SNP6,
SEQ ID NO:39 and SEQ ID NO:40 for detection of SNP7-8,
SEQ ID NO:41 and SEQ ID NO:42 for detection of SNP9,
SEQ ID NO:43 and SEQ ID NO:44 for detection of SNP10-11,
SEQ ID NO:45 and SEQ ID NO:46 for detection of SNP12-13,
SEQ ID NO:47 and SEQ ID NO:48 for detection of SNP14,
SEQ ID NO:49 and SEQ ID NO:50 for detection of SNP15-16,
SEQ ID NO:51 and SEQ ID NO:50 for detection of SNP16,
SEQ ID NO:52 and SEQ ID NO:53 for detection of SNP17,
SEQ ID NO:54 and SEQ ID NO:55 for detection of SNP18,
SEQ ID NO:56 and SEQ ID NO:57 for detection of SNP19,
SEQ ID NO:58 and SEQ ID NO:59 for detection of SNP20,
SEQ ID NO:60 and SEQ ID NO:61 for detection of SNP21,
SEQ ID NO:62 and SEQ ID NO:63 for detection of SNP22,
SEQ ID NO:64 and SEQ ID NO:65 for detection of SNP23-24,
SEQ ID NO:66 and SEQ ID NO:67 for detection of SNP25-26,
SEQ ID NO:68 and SEQ ID NO:69 for detection of SNP27,
SEQ ID NO:70 and SEQ ID NO:71 for detection of SNP28,
SEQ ID NO:72 and SEQ ID NO:73 for detection of SNP29,
SEQ ID NO:74 and SEQ ID NO:75 for detection of SNP30,
SEQ ID NO:76 and SEQ ID NO:77 for detection of SNP31,
SEQ ID NO:78 and SEQ ID NO:79 for detection of SNP32,
SEQ ID NO:80 and SEQ ID NO:81 for detection of SNP33,
SEQ ID NO:82 and SEQ ID NO:83 for detection of SNP34.

47-61. (canceled)

62. An isolated nucleic acid sequence comprising at least 90% similarity to a polynucleotide sequence selected from (a) at least one sequence selected from SEQ ID NO:1 to SEQ ID NO: 28 and SEQ ID NO:84 to SEQ ID NO:91 and any combination thereof, and/or (b) at least one sequence pair selected from
SEQ ID NO:29 and SEQ ID NO:30,
SEQ ID NO:31 and SEQ ID NO:32,
SEQ ID NO:33 and SEQ ID NO:34,
SEQ ID NO:35 and SEQ ID NO:36
SEQ ID NO:37 and SEQ ID NO:38,
SEQ ID NO:39 and SEQ ID NO:40,
SEQ ID NO:41 and SEQ ID NO:42,
SEQ ID NO:43 and SEQ ID NO:44,
SEQ ID NO:45 and SEQ ID NO:46,
SEQ ID NO:47 and SEQ ID NO:48,
SEQ ID NO:49 and SEQ ID NO:50,
SEQ ID NO:51 and SEQ ID NO:50,
SEQ ID NO:52 and SEQ ID NO:53,
SEQ ID NO:54 and SEQ ID NO:55,
SEQ ID NO:56 and SEQ ID NO:57,
SEQ ID NO:58 and SEQ ID NO:59,
SEQ ID NO:60 and SEQ ID NO:61,
SEQ ID NO:62 and SEQ ID NO:63,
SEQ ID NO:64 and SEQ ID NO:65,
SEQ ID NO:66 and SEQ ID NO:67,
SEQ ID NO:68 and SEQ ID NO:69,
SEQ ID NO:70 and SEQ ID NO:71,
SEQ ID NO:72 and SEQ ID NO:73,
SEQ ID NO:74 and SEQ ID NO:75,
SEQ ID NO:76 and SEQ ID NO:77,
SEQ ID NO:78 and SEQ ID NO:79,
SEQ ID NO:80 and SEQ ID NO:81, and
SEQ ID NO:82 and SEQ ID NO:83,
for use in genetic-characterization of improved rearing properties in predatory mites.

63-70. (canceled)

The application's sequence listing, which the Patent Office published only in electronic form, follows.

SEQUENCE LISTING (91 sequences)

SEQ ID NO: 1 - DNA, 1742 bp, Phytoseiulus persimilis
  source 1..1742: mol_type = genomic DNA
  variation 163
ccctgaccatcggttctcacagaaatgcgttcacgaagtttctctccgagagtgattgctcagcttcggatgtatagcgggttcgaggagttttggagcgccgagacgattttccgggaggcaaggaaagcatcccctggtgctcccgctctccgagctagcggcagatgcgctgaagcccacgaatgagctacaggtcaggagaatcgatgtgatccgagaggaggaaatagcagtttactacgggctagaatcacgaaaacatctttgggagcagccagactgtagaccgaagtcaagttcgtgtaacctaggacgccacatcgtgtccaggaatgggtatgatgggctacgcatttgtgagtcagagttgggacacgtttctcgcccccaaatcgcacaaacgttcgcgatccctcggccgacttgtggccggagcgttcgcatgccacatgtttttacgcataccaagcgtggttctaaacctccgcggcacccggcagcgggtatgaggtgtaagtcaaggcggcgaggaggtttgcctgggaagctccgtaggaaccgctctggaagtcggagggtgagctgtgggctgacgcgtcgacgagcggctccttgatttccagagccctcctctatcaggacggcgtctggtttgatcaagtattccgcactagctcgggaaagagtcatccggggagttgtttccatggaaaaagatgagcgatcgagctttgccactgatgaggcctggtgtctgaatcgtttgcatctgcgtggttctccatctgttggcgtcatccttccgctaggggtgaatggaagccaccgtggtggatcagagatgtcatagttcactatcagaccgaatgctcgcgcagtaagttatttcgacgattcacacggccttggacgtgggatgattttgcagctgatggtggttatgcgtcaaagaccagggacgacagcaacgtcagttcggagaagcgatccgtagctcggttgatgacaaggcctgagaactcggcgccgatcgagggtgttccctcaggacaagcctgcggtcgcgcgccgcagcctccatgcagcgagttcttcatattattatacaatacaatggtctcgacagtctgctgcggctcatttctggcttcccgttgagtctttgagctccgttatttcgccttgtcaccacagcggtgagcctgcaatatgctgtttccgaagtggatcgtccgcgctgtagcggcttcgttgattcttgaacttccctcttcgctgcgagcaatgatagccatgagaaccaaggaaccccggctcattgattggaagaacttttggtacttcggaaggtgcttgcatcgcaaggagatgcatattccagacccgttattaatggtgagagcccagccattggccaccagcgtttccgaatggttcggaagcccgcttgaggtcaaatgaacttccaggctcgactaccccgtccgcggtgagtgttgtgaagtcgtccaacgggcgaatattctcttcaacacaatcattcaacgcagcacaacgtattgccatgtttttccgcacgagctggttcggggccgctgtggagagtaccatcgccgtcctatcccagttacccgactcgaaattaccctctctcaccgccaaatcctcacgctctagagtctaggtctagagtcacgacggatccctaggagaagcataggaactgactgaaagagata

SEQ ID NO: 2 - DNA, 778 bp, Phytoseiulus persimilis
  source 1..778: mol_type = genomic DNA
  variation 181
gtctaacacagagcgggcatcccagaagtcttccgtaaggattaagttgaaccaagggatctggaacgactctatgttgcctcatgtttgatgacgtaagacggtgcttggaaaaatggctcacctgtacctccaaaaacatggtactcatagcagggaaactcggactatgagagacttcacctcgttcctcgaggagtgttttgtgagcgggttcgaaagtcttacctacctctacttctcaccttgtgaagccgaccaggaatctctattggtatttcgttcaaaaacaaaactcatgaatgtgaggagaaccctgaatcccttgaatctcaccgcggcaagcaaaggacatgggttagggtcatccgtctgtttgagtcgttaattaagttttgaacctttttattcccttcagaatccgtcccggcctcgaggaaacatccaagcgatgcagttgacgtttgatgtcagtggctccccagggttcggctatgaagctgaatagcgagggtttcgaccacgttcggggtgggtttgctgtctcagccgcggtggccccttttgctgctgctgattccgcttctgctggtatccccgcaaggaatgtcgtcgagctggtattgcgacccgcatgcatgtgttacagtctcctcgtatgacgaagttatgcaaattacgctccttttatggttaccaacagccgtgtcatggcactgaaaccgaatgtcaacgaggaacgactcgcatcaaagatctccagcatcggagtttccac

SEQ ID NO: 3 - DNA, 1818 bp, Phytoseiulus persimilis
  source 1..1818: mol_type = genomic DNA
  variation 197
gaacgaggctccgtgtacttgcctccgagaggagcgggagaagagggctctggcccccgagaactatccgatggctcgatgattagagacgagtatgatatgtatgaaagcagtatatctcgagccgtaaataacttctgtgaggacagatgttactcatcgatcggtcagacggcggggaggaagaagtgttggggaagcgaatgaagagagggagagccgtctacttgaacagctgaggagagttctcattcctacgctgcagattcactcgatttctccgggactcaaccaaactccctcataccgctagaccgagggcaggaggaatgctgccgcgactaaggccccggtgcgtggattgcgattgagagcaagtcacagacggtgggagagatgaggaaaaataattgagtgcaaatccaacgcccgtccgagcgtggtcatagttggttcagattttggacttcatatctgacccgccgcccgggggcttgccttttaggcgagaaataaacctcaaaaactgagcggggttgattgacttctcggaggacttcctctggaaaccgctttgaaaaaaaaaactccggactcactgagatctccgggagctactgtaaacctcccgaaagacgatccgaggaaagcctcggtggctgatgcggaccgagtacgtcgacatctcggtttgcctgatggcgcttgaaggtagcagactcaggccgggattgctttgattcccgctcatcagcaatcaactcgaatgcgagaacggcgtccctgggcccgaacgacgtaggtcgcatccaacatcgagctcacacggaagagaaacagcgagcgtctctaattcgcgctttggtcttcgtctattagcagttgccgcgaacgttactttggttcccgctggtgatccagccgtctccccgatactttgccgtccctcgcccgcttgggtatatgatgaacagagctataaatagctccataagaagagaaagagtgggttgaagcgcggagtaaatgtctccctagcatgagctcaaggattccttctgttgagtattccccgctgcttttgatttttcattgctctcgccagtcaactttccagcgagaccgttatgaagtgaattgcctctgagcagcgaaatgagcactttcgcgtgattcgatcagtccgcgattgagagcccatggattctgctccaccgttccctttttttgttgagtggctttgctccactctcccgagaacttcgagcagcgtctttggacaagcggacagcaggaaaaaaaattgtacagtggaaacgcagcgaggcagaaagacatgtctgctgtttggcaaagcgtgcgtctcggccacaaacagcttcctcgctgggggtgaagtacagcaaaactaacaataaaccggaacttctcccggaagttgctccgggtggggagttaagccgagctgcccgttcatcatcaaccgcggtcaagagattatgagaggagagttagcggtacgccgacggcggctgcgatacacaagtggaacccaccgcaagaaataaagttagagcgtcggattcctcacggggaggaaggaacgccaaccgaaagaagctgctgcgacacgcgaactgccaccggtgcgagggcgcgagggggcatatcggtggcctctgcagatttatatttagcgttagacgtcggcgcacggctgctcattcccgcggtgaatatttcacgagtgaatatttcgatggagtcggtcaccgacaaacacgcgggtactcggaccgacgggcaggtaaacacaga

SEQ ID NO: 4 - DNA, 1560 bp, Phytoseiulus persimilis
  source 1..1560: mol_type = genomic DNA
  variation 111
  variation 165
aggtgtccgccaatggaatcatgtcaaccggcccggggggagcgcgtgagagattcgccgagaggccactgtttgggaagcgcgtaacgaatcaccccagtttttacgccattgctccaaggagtccattcgttcttcactgaacttcaggagctctaatctctcgcttaaatgtctgccgcctgacgagctacagtaaaagttgccgtcggccttcctctcgaatccctgattgggttcccagttttccgtcccaacctcgttgacacataaagaatgggaaatgaattttgtgtcggggcgtctagtgcagtctgagacgcggggcctgaacctatttcccgcgcagatttaattgttgtcgggttagctgagattcgcttggcgctgaacaagcgcttcaggctctgcacccgtatccttaccagccttgtatgggtttatcgtcctgaatgtatctctcgacagtgctctctttttctctgtctagtagccgttgggtcgttcacgtgtcgcttgtgttgttaaaagttttgtaatgaaatttaccaatttgtgtgtcgtcacctagcacccacgcgggtgggcgagcgggtgggcagccggcctctcgacccggggctcgcgccatttcccccgagggaccggtacacttgcccctctctctctctctgttagacggcattcactcctgctgaagagccgtccaagcgttcgttcgtgcatcaagtcactccgtgcccaccttcatcgaccaccaatcattcaaaacggagtccgaagccttccgcatcatgtcctccccctcgaagcctccccagttctgatctatccggccatgagtgatcgatgagtgttgtcagttttcccgtccggaggtttccagggctccttgagctctaggatgcttctccggagctcgggtccccacttgccgggagtaaaggaatactcgaacatgggagagatgagctgtaaaggagcagtgagaagtcctcctgaagtacacctggagtcatcaagtgggaggccgtttgaaatgcattaagtcatcacccgaccatcaccaaaaaccaccgacgaactattaccgtacgaggcttcataaaatggtcctgtaatgaatgtgggcttaaaatacgagcacgctcgtttcgatactctgcagagagttcggctcctcgggactcagactttctcctcgacccgccggctcctccatttcgttcattcggtctctcacaaggtgttcgatacgagctttcagccttgtctcgctgcaaaacgaactataaaacactgtaaacgacgtaatttcaaggttctaaaaacaccggctcgtcctctacaccagaacgctactgtgggtgcttggtctagtttccctcggttcgtgtccaggtgaccagtattccggagagtgtgatggcttccccgctggaatgtaatcgcgaaaactcgaaacaaacgtagccacgtcgccttcaatgaggcatcagcagaaatttgaattgcgcgttgtcagcgcgcaccgctatgcagatagcccaagtctcccgt

SEQ ID NO: 5 - DNA, 652 bp, Phytoseiulus persimilis
  source 1..652: mol_type = genomic DNA
  variation 193
acacggaaccatcccatcaggatacactgggagtcatccctttcaggatcaagccagcgaacattctccgattcccagttcctcatccttttcgactcttcgatggccgagatgaaaccgcgctttgaatagtaatgaaatcgaaagggcgtagtcgaggtcgtctaggaaggagctacgggaccgatcgacttctatctccggaaggaggctgcgagggactcagcccgactcatccatctgactgagtgactggcgagtgaggagatcgataagttagagggacccgctttgtcatggcacgttgacaaatttggacacttgtcgattgaactcctttttccgcggtgtgtcctcacttcggtgaagggtccagcccgcgtcggacctgctagcctgagggcatccaacgcattgacggacattgttctccgagggaatccctgcttcaagtgttgagccctcgagagcgggggcgcgcgaagaaacggaagaagcaatctgcgtaccgagcgtagggctttatcgctcgttgatccgattcggccgacatgtacagctactctatacccgattcgaacgatccgctggagccgactgcaatcaggagccgccgaaggtacaacttcaacggcgacctgactttcttcca

SEQ ID NO: 6 - DNA, 968 bp, Phytoseiulus persimilis
  source 1..968: mol_type = genomic DNA
  variation 186
  variation 193
actcctggtccctgtctctcggatgacggcgtgaattttcgacgtggcgcgatcaagagagtcaagctgaatgattggagcctgagaagagacttttgagcccacatgtcgcaatgatggatcggcgatgttcctgaccagaacgaccacctgggtcgcgacggaggtcaaagaattcgcaaagggtgcaaagtgctgtgaaaatcccccgatccgccgaaaaaatcacacgcgagcccaatttccacgaaacagcgcagaagtgtgacggagatgggtcttttggacccgttcagaaccaagaatggaaattggaacgccggagaccggattcctgcatacttcatttgcttcatctataaaagatcaagtaccatcgctggtcggatctagagtcgtcctatgctgtgcaaatcaagagagggagaccgattgactgaatgacgcaatctgggtcatttttggaggacaggtgtccatcgaagggtttgaatgtcaccgaaacgagttcggttctgtctttttccctcgaagacgagaccgaatccacccgaggttcctcgtggcacatatgacggggtgatccgtggcacaagcgtggatgactcccaacaacgctcagggtctacctcgttcagattctggatttccgactcagatttccgagcagccatccatcagcagcatgagagatgagaaatcacccatccgtggcgagtccccggggacctcctccggaatgagcggccacggctgacttcggatggtttctcggagtgagcgaatcctccgatgcgctgatttgaatctcgatttcggcgccgagttatatcataccgacaaaatcattggatgaagcgggtaaccgactcgagctcagcagtgctgagaacacattagctcgccccagtggtaactgccggaacaaacgttgctcgacacaacaagatacggagcggctattcagc

SEQ ID NO: 7 - DNA, 533 bp, Phytoseiulus persimilis
  source 1..533: mol_type = genomic DNA
  variation 161
aacgcttccagaccctcatcggaattgaacggagagaaccgaagcgggattcagagaacaaaaggagcagcgacgagtaaaactaggagtgaggttgacttcggcgcattcggaccgttgggacaggcaaaccaacgaatgagctcttcgcgtcgttatcaacgcacaactagctctcgctcttgcagctcgtttccccctgaaacctttctcgcaatcttcacttcactgtgctgaggctccagcggcttctcggaggaattcttggaaggaaaaactgaggcgcttgctcccgcacccggtcgttctccgggaatcccccccccccccacagactctttgaagttcgccgatttgatggatctgtcgattgtttctcctgagcacttcctccacggagagtcttagagcgactttgtgtcggagcagcgctcctgagcgccttgaattttctaatgatgaatgccgtctctcgatcagaaattgttctggtcggggttttcagttccgtcatctgtcgcgttcttccgaaa

SEQ ID NO: 8 - DNA, 890 bp, Phytoseiulus persimilis
  source 1..890: mol_type = genomic DNA
  variation 203
  variation 213
tcacttcactgtgctgaggctccagcggcttctcggaggaattcttggaaggaaaaactgaggcgcttgctcccgcacccggtcgttctccgggaatcccccccccccccacagactctttgaagttcgccgatttgatggatctgtcgattgtttctcctgagcacttcctccacggagagtcttagagcgactttgtgtcggagcagcgctcctgagcgccttgaattttctaatgatgaatgccgtctctcgatcagaaattgttctggtcggggttttcagttccgtcatctgtcgcgttcttccgaaaagccccatggctgagatcggaagccggagagatgatatctgcagcagatttaaaatgggagcaggaagtgtgcattactgactggcgatgcacacagatctccgaaatgctctgctcgaccccgtcaaccttgggtcctgatcgcgagtgtctgagaacattaggaatccacgctcgttccgtggttctcgaattctcgtccgcctggtaatgggacttctcatcgagcgccttgaacgacggggaaatattttttttatttttcagtactgaatcaggggcggaagttctctttgtgagaggtctcttcgattttcggcaaccgtccctacattccgaagcgttcccaggaggaaaactgaagaacaagaacaggcctctatagcgttaggatatcgtagaattaggaagttgcagagcaagagctcttatagcttgcttcaaaccctcatgtgtcaggaactcgggaatatccagggagacgcgcacgacaccagatgtgtttgacaatgcccgagttcgttctccgcggagcatcataaattctgaggatgtcggcgaggatgcaaaactagcg

SEQ ID NO: 9 - DNA, 1652 bp, Phytoseiulus persimilis
  source 1..1652: mol_type = genomic DNA
  variation 163
  variation 192
gcggagagagctggaatctcaattgaaacgtttttttttttctcacattcggaacatgctccgccggattcgggtaatattcgttgagatggggcacttgaaccaagagacctttccacggcaaacagcagatactttaagttcgagagcgagttcctcctcaaatcgcaagtttccactcacttgactcccaactctccaggggtcgtttctagaatcgtatgaataggggactggacaggatatgcgatctgcaaccacgggctctgcacgatatcgcgaagcgaactgatccgcatcgtcggggcctttaccaccatgtttgctttcaagtcctgagtgaacagctgcatcaggatgaagctcccgacaatccaaattccaccttaaattgaaaatggcattgtggagatttcacctagggagaggacacggcgaggtgtccgatgtgtcaggacgccggggaaagttgagctctagctcgaatctttagcctaatctggggtttcttgttatgcagtaggaatcgatctctcgattggatggttctcgggtggtgaatactgaccgtttattcgggcgaaatggtatgtgaatctatctttggttgattcctggagaagagtttgacacatggcgaacaaatccgcagacgaactccagaacgtgagctgggctcccctgaccaatcgttcaatcgttatcagcgccgaaagacaaatgatcgatgaggcgatgaaaatccaggtcacgggttcgaaagctctagtgtatggcgtaggcttggtctcgaatgcttttctcatcccggtcagcgccgttatggaggtgtgctcgctgctcggcatcatgtcgaactgcatgaatacatcgtagtcagaggtgaacggcccgaccgctagatccgcttcctgacgctggagggcaccgagcatccctgaccaggtattgttctcgaacagatgaccgtagagaccgtccgatgggatccatgcaacgtaagtgtggttaacagaggcggtgatgttgtccaccatagctccgattatcccctctagtttaatgctgccgtctgggaggaccgcttgcatgacccatggtttgaactggaaaaaagtggcgttgagtcatgttatacgtttggttccgccatatgatgattcgggacgatttgcttgaaccgatactcggaaactttcatccaaggtttcgctgttggtggtggtgacttcctttgttgagatcgaaatcaaaacgagtgaaacggaagaaggaatcgaggcttcgacgcgggaggtggagagaccagagtctcgaaggcaagtccaattgagattcgaagagtgaaagaacgcgcgagagcagacaggtcgaccagtctgtgagctcagggcattcctcctcccaacgttctcgactcagaatcgaactatcgcctctcgcttggcgcgcatcggccggatgaatttcgaggaagaagtgggtgaggacctcttttcgctcatggcggaggttggagtgactcaacgaactatccgccgctttcggacatcatccaccgatgcagtgggctcgggaaaatttcaaactttctgtatctgctgaatagcgctggaaagctgttctactggaaacttcgcttcgagactgca

SEQ ID NO: 10 - DNA, 3251 bp, Phytoseiulus persimilis
  source 1..3251: mol_type = genomic DNA
  variation 208
agtcccctttactacccgctctctgtgccatacactcttcggttcgcaacggactggcacgatggctaacgctcttctttcctgccaaaaggctttacgcccgctggtttgcttgtccagccaaccgctccccagacccggccccgttcgcttcctcatcctcttctatgggttcctctattactccccgggaagaggtggccaaaaacagccggccggtcagttcgcgtgatgcagccactggtgcactagccactgcaagtagcactttgacaccgacaagcacgctacagacggcgaaggattcgacgacgttgtcctgacctgagcgacaaaaggcgccaaaggagaaatggtgttcgccgcccggcaatcaggtggggggggcggggagtggcgcgacaagtccacttcccgaagtcggtgaatctatcgggtggcttgagcagcgaggttctcgaatgatcaccgcctttcctcccgaagatccgaggagaacttttcctcaagcgacggtcacctccgaaaaacgcggcttctgagagtcggctcgccgatctcccgcgaaatgttccggcatgagtacggcgaccgagtactggccttgatcacagtcattttgaaaaagttgaccaacacgctacgcgcaggcgaacttgagtctgcgggaacccgcggagggaagctcgcttagcgcgggaacagccggatgcgaaaggaacggagcctcgtggcgaacaggcaaccaagcaggccgcgctgcagccaagcgagcaagcaggcggacggcactaactggttgagtttgtctgttgctcccagagccgcttgttcacttgcccgcccgctactcggtgcaatgctaaaaggtaggtgtagtgtcggaagtagcggctgtggtggtggtagttcaatcgtgctgttcccaccccttttctgcccccgttgcttttgctcccgcgctaccggtgatgttggttgaggtgggctgccgctagcgtgctcaccaagagttagcggcaagagcgaaagaagaagcagcaccggccggagcagtgggacctctacccagaatcaactgagccagtcgtggagggctctgtcacaaggagaaaaaaaaaacgagcaaaacaatattaatgtcggcatcagcgcgaacatcgggacaataacacgtgtcatcatcaaggccgctcgaaagctcgttcgcagcccccctgctaaagaggagggcggatcggcggctctcctcacttcattctatccaaatcacaaaacaacgatcatggttttatcggttcgtcgtcggtgccggaagctcttcgtcgaaggaaaacaagctgcgttttttgcgcgagtctggttcgatgtccatccatccgacaacaaaccaacaactggccgaatgaatgaccggggacacgacgacaacgaccaaacaaactaacgaagcaggacatgcttctggcgttgcaatcgcaatcgagaactccgacaagcgagccagcgacgaccaagtaactcgtccctgctccgtctccgctcggccggttgttcgctcgtgcttcttctgcttgcgcttagtctgcccccgtcgccttcgctaaggcagagctgcggctgctgatcgtctcgtttcgtctctccgcgtttgaggcaactggctcctcgacggcacagcgggaagggggcggggcgaggagggcgcccgctgcccgagagcagggcaagccttcgagcgagcggcgcagagcgggggtaggcgggtacagaacggtgaaagggggaaaggcgaagcgtctactccctttgctcccttgaggcaacgctggctggcttgctcgctcgtccgccgccgccgccgcacacccgctggctgtcaggtcttttctctccgctgcttgtctgtgcttctcccgtgccagtcagccgcctccgttgcccgcctgcctgttcgcccgccagccacccatccagtcggccatctagccagtctgcttgctcgctggcccgcctgctgctgcttctctcccccctcgcagccccccaccatcaccaccattgccacgaccgaggctgctgctgcttctccggtcccctcccccgctctagccatcgttgcccaccgcgcccacccgctcgcccgccgcaggaggcagcagcggccggctcagccagctgagctcgccgaacgttcgctagccagccagccactccgtttgcctcgccggtgctctccatgttactcgtccgctcgttcgtttggcgcgctttcttcctcccttcggcgctctccgggagaagagtcgcggcgagcggtagagtgagcacgtcctcggggggcagcggagcaaggggtggcgggcaggcggcggacggacgggagagcatcgcgggaccaccatcacaagcagcagcagccgcagccagtttgccatccaaccagcggaccgaccgagcgaccaagcagtcccccacagagaaaacccggcgcgcggatgagcgaactggagagagcggcaggaacagaagaggcgacgccagtctgccacccgcgggcgcaaacgggaacgaccaacggcccgacagtctgaccgagagacagaccgaccgagcgctgtgagccgagggccggctgaccgaacaggatgagggtgagcgaacgagcggaggggagggggggcgcgaacgacgggaaacggtggggcagtcgggcgggccgctattgccgccagctcgccgttgccgctttgctgtcggacagacgttgcgactaccgataggcctcaggttgcggaatggtgatggtggcctgccgtggtggctggctgcttagctgctcggtgtacgcagcttgactcgttgatgctagttatcctagacgatggtgtttttctaccactttcgcctttattggcatgacgtcatcgatgcggatgatcaccgtgcgcaacgcatgacatccaggtggtagaaccaccgttttcactttacctcttcgagggggagagaattatttagagttgcatgggctggggcgagggagagaggagtttaattcccgtggtacgcaggaccttttggggccgcgtattcaccccggtttcggtagattgcccggtgctattttcttgtgtcccgtcgtcggacgtccccgcccaggaaggaattaaacaaacggaaaccttgttaaccctcgggccaaagtgttcgctgaagcgttcgcccacccacgaacctgcgaaacttca

SEQ ID NO: 11 - DNA, 1541 bp, Phytoseiulus persimilis
  source 1..1541: mol_type = genomic DNA
  variation 199
aacgaagctagatcggctggtggaaatccgagagctcggcgctcatatcgttcctttggagcgcctgtttaatctgacgaatgacgctgaagcctgaattttcccgcgtgatccgttccagcgtttgattgaacaaatgtcctagtttcagggattattccatgaacggagctttagatttctggggggcaacgtccaacctggctttgactcgtggaatgcacgaacgtgtgaaggagttttgactgaaatttgcttcacggtagccatgagactatcgacttccgaacacctgacgcggatctcttgacgaatacgctgcggtcaatgggcaagacaagtcacgagtatagagctctcatatgaccggacatttttttctgcgaaaaacggacatcttgcctggaaccggaaaaggaggcggacatgaaaatttcgcactcctccagataaatcgagcatgtgcgagcattgggtgagagcattttcaagccatcaacttaggtaccgtcacaggtttcctattcgacgaaaagtaggtcctcattaactgtgtcgatgggagctttctatgttcgattgtgacaaacgatgttttctgtccgaaaaaaaattcctgtacattgagaaagatttctccacttctgcattagagaggttggcgtgcttgaacacttcggagtctcacatcatccgccgttgatcggaatcaggaattttctccaaaattctcttgagccgtgttgtgaaaggacctttgagagttctgtgaatccagctcaggatgccgatttgaaacttgtgaaaattgcgcagtcaaatccagcaggagtgccaggtctgggtcatcgactagggatttcagcgacgattgtttgaatattcgagacgaacaatttgatttcctcgaaattttcatgggggttgaatgcgttgctcagaaatgtgacccagcctgtgatcactgtctcttcgggttccatatcgacgaggccgccagtgggcgtcacctcgatcgcaaagcacacctcgcgatctccagaaactccgctaacacagtcaatttatgtagccccgcagatacagagcgaagatcgatatttcggctgttggaaaagctctctccttgtcatctccttaaattactggaatcatttcgcgctctgttgcccgggaaaatcgaactcttcgggaattcattcggagccatggttgaccactcgatctgtgagcctgaaaaccggacatttcctcggttgctaaagaaaaccggacaaacggacggaaaaagccggacatttccggtcacatgggagctctacacatgaaccatctctggtgaagtactccaacgagcgcttccgaagtcgaggacgtggacatgctcgagaggattgaggatgcgctattttgagcgaaagcgaagtgagcccgatccaaatctcagagttctataccatggatatgaactctgcattagcaggcttgttccataaattcaccggtgcatggaatcaatgtgatagccaaaatgccagccg

SEQ ID NO: 12 - DNA, 1076 bp, Phytoseiulus persimilis
  source 1..1076: mol_type = genomic DNA
  variation 266
cgagcattgggtgagagcattttcaagccatcaacttaggtaccgtcacaggtttcctattcgacgaaaagtaggtcctcattaactgtgtcgatgggagctttctatgttcgattgtgacaaacgatgttttctgtccgaaaaaaaattcctgtacattgagaaagatttctccacttctgcattagagaggttggcgtgcttgaacacttcggagtctcacatcatccgccgttgatcggaatcaggaattttctccaaaattctcttgagccgtgttgtgaaaggacctttgagagttctgtgaatccagctcaggatgccgatttgaaacttgtgaaaattgcgcagtcaaatccagcaggagtgccaggtctgggtcatcgactagggatttcagcgacgattgtttgaatattcgagacgaacaatttgatttcctcgaaattttcatgggggttgaatgcgttgctcagaaatgtgacccagcctgtgatcactgtctcttcgggttccatatcgacgaggccgccagtgggcgtcacctcgatcgcaaagcacacctcgcgatctccagaaactccgctaacacagtcaatttatgtagccccgcagatacagagcgaagatcgatatttcggctgttggaaaagctctctccttgtcatctccttaaattactggaatcatttcgcgctctgttgcccgggaaaatcgaactcttcgggaattcattcggagccatggttgaccactcgatctgtgagcctgaaaaccggacatttcctcggttgctaaagaaaaccggacaaacggacggaaaaagccggacatttccggtcacatgggagctctacacatgaaccatctctggtgaagtactccaacgagcgcttccgaagtcgaggacgtggacatgctcgagaggattgaggatgcgctattttgagcgaaagcgaagtgagcccgatccaaatctcagagttctataccatggatatgaactctgcattagcaggcttgttccataaattcaccggtgcatggaatcaatgtgatagccaaaatgccagccg

SEQ ID NO: 13 - DNA, 1495 bp, Phytoseiulus persimilis
  source 1..1495: mol_type = genomic DNA
  variation 216
cgaagtgagcccgatccaaatctcagagttctataccatggatatgaactctgcattagcaggcttgttccataaattcaccggtgcatggaatcaatgtgatagccaaaatgccagccgaaatttcagaaaaggctgaaaacagggatataggacatttcaggcattaatggcactctacctgaaacccctgtctacaataatcacgaatatgaaggttcaaatcatcgcatggttccgatttcttgcgggcgtgaaaagtccgagagcgaacaaaatcaatgtcgcttacataccaagatacattacataccaacatattctttgatcgacatacttgctgatcgtcatcattcggtactctgacatgcttgatgggagatgggatggaatgggagatattcccggagccgttgatgaaaacttgattccctttgttccatccctggaatgccagattgagtgttatttatttcgagagatgatccttgttagcgtattttgacagggacgagttacctcggattcttggtgaccgagcatcattcatcgaaatctcccttttttcgagaaatgtcgcatagccagaattgttcacagactgggaccgttatcggatatgccgggatgagtctaagaacaccccgaaaattggacaagaccagggatctgtagctgaagacaaggggactcgagaaatcaggcatcaaagaggaattctgttcgtcggaaaactggggcagtacgcgatgactttctcgttcgccccagcccgacattctgtcgtcccgttccatgatatctttctgaaggattccccgtattgctccaggaagacacaaaataggatattcagttaactaggtcggagcgaatctatccaacaacgtgagctccaccatgacggtgggcccggcggcttcgtcggagtcctgaggttagccaggtggttatcttcgactcgttatccctctaatttcggcttaaagtcgactatatgccatgtcgagctgcgaagagcgtgaggttccagggtagacgctgaggctagcttaaccaccaatagcggcgtgagatttattcattggagctttatttgagagtcgatgtttgaatccaatcgaacgctttcgagaaacgacttctgtacaccactgcgcccctcaatatacctcaatccgagctcgggtgatgctcctccgcgtagtgttcaccgtcctcagctcgtctgcgaggtaggactttcaaagattcctcttgaggtcattgcgagggaggactggaaaaatatttcggaagaatgctatcatactgcctcagatccattctagctcatccgcgtactcgttcctcgttcggggcgagcctatctctccatacaccgcgtagcatacttccggtagtgtcctagaagaggcggaatcgcgaccccatttgtgatcatgttctccgggctcgagaatgaataccgaccacgaaacgagggggagtttga

SEQ ID NO: 14 - DNA, 2397 bp, Phytoseiulus persimilis
  source 1..2397: mol_type = genomic DNA
  variation 187
ttagtctacggctgctcacgtgaatgagccgattcggctaaaagtccgacattcgacggctacctcgatcttctccaatcctacggggccagttcgcctctgttccgaactttaggccgaatcagctgctcgggaaaccatgtgccgctgcgatcacatcagctggtgagagcgaccaatcccgtgctttctccagagtggcaaccggagccggctgaccagttaagctcgggagcttgcaaaggttgggcacgattcgtcatcgttcgaatcccggtggacgttcgggaagagaccggtcgctcggagatgatgtatggaatcttgaactcggagcgttaaggcatatattttcttttggacccaacttcggaactcagatccgaataccccttcctgataaaactattggttggaagtgctcaaagtcggcagatggcagaccttgaagaactcctcgctgtccctgtccacagtctgggcacgcgaagcattgatctcctaacatcaggtctccaattgcaacaagttattccaggtaatcctttgagaaatcacatcgaaccaatgtcgtaaatggatttagacctgatgtcagacaacggccccaaactcgaacgtattaccccgaataccttttctgagaatgacccatcatctcgttgacggtcctgccggacgaaaacttcttatcttatctcttgtcgttctggaatgtttcgctacacaacctggttacatgctcgcgcccgaccgatttttgaatcgcccatcagggtgtcgtggtaaaattacaaaccgaaattctgttgcgcgccactcgatgttcggagagctcggatttcggccgtgccttgcttttgcatcataagagataccactatgcagtttccctcaaatcggcgggcgggttccggaacgcttgccccgccggattgagaccggcgactgacttctcgactccgctggagtttcttctcttccaggcagagggggatactctcgtgattggcgagtgctggcgcagctcgtgcttccccacgacactctagccttgctcttaatgtccaatgaacccgtcagagagacattaaagttatggcccaaagaggctacggttggtgagtccggagatgcctttcttgaaaactcatcccagtcatggatgcgagtcatccaggtcctcaagaagtcgaatcattccaggtcaactcgtgtccgccttggaaggcgtcgagcgtttcgacgttctcgacgactgcttagattccattctggacgattgtagagatttcattcgcagacgagattattgggagaaggacccatcaataattcaagcgacgacatttcaagcttttgttatacacgtcctcgaagatgtcggtaggttctgcttcaacaacgagtggttgcgacgaatttagctttcgtaggtcatgacaacggcttctgtcaatgggttttccgattttcaacccgaggctcgagaagtctccgagcttcattcgcgctcttcccatgggtcgaagaatctaccgctgcgatcgattcccagcgttcatcctcgatcgtacaggagggagcgagagaattgttcacttaataacatcatgtttcctctagagttcgttcggaggatggtcacgagggttgaagatgccggcctttcgttgtttgtgccggcacgtgatttcccagcggcggagcgtaactatgtgtactcgctcattgaggtatattgggtgacttttccgtggtggtatcgagatgcttgcgtttcggcacgatgtttcgaatgcgccaagttccccgtgtttcgttgcagataatgcagacgcgatgtttgaaagtgatcgtggtgatttcgcaagccctcgcaaacgatgcggaagcgaggactcttctagagaacgcagaacggatccacgctcaggaagcacaacggaaactcatccctataatcctggaaccgtgttcacatgttggcttcatgatttcttccatctccaagatacgcttcgacatcaaaaaagccgaaagctggcaatggcctaggctcatggaggcgttgcgaaagacgacctaggtcagcaattcctaccaagcccaaaatcatctcatagtttcgagatatcaaggtgattcacacatttacgtttcatcgctcacatccaggattgcaccaggaccgaccagagcctaggatcacgcaatgacttcgcatgacccggaccgcgtgaatgaattcatggtgcaactgtctcggtccaaggaactcgaggagagaagctaacccagaacgctccggtgttgtccagggcatgagactcgagtcgcgtagtactcgagcgatcacacctggcattggaagggcatggcgagcgaagagtatgg

SEQ ID NO: 15 - DNA, 1565 bp, Phytoseiulus persimilis
  source 1..1565: mol_type = genomic DNA
  variation 279
gctcgggagttcgagcatactcatatgagttacaagtaatgattatgatgacactgaatcgtttgagttctcaaacatctaacgtaaactctatatttcttctctttcttcgacatattgtgaacacagaaacagacgtcatcctcatgaattatttacactgagtggatagatggaagttgttcaatgtacgttgtacattgcgcgtatcaaatagatctctgcccgggtcacggtgcgacttccattccgaagttttctatgcattcagaatttgggctcccttcaactccttgctcttcgacgggcgtcaatcgttggacgaaccgtaacagacagtgaccatctgcaatccgatattccggatcccgctaatttcatggctcgatcaggttccttgtcgcaccgattccttcacacaataaatagtgctcgatgaggtgatgattcagagcttgaagaatctcaacgccttggccactttggggaccgctgattgcgataaactcgtgttcggagtcgagctcttgctgaagactgagtgattcgggtcaatcccatcgaaatatctgtccagggccaccgaaccgatctgcgcggcttgagaacgcttcacgacgtagtgttgacgcgaggcctccgtgtttggcgtcgggtttatccatctggggagagagaaacaaacatttgaaatcacaggcccgatgggtcgaggattacgcttcagagacgccgagagttctgccaagctaagatacgcgggcagaattttttgcgcgtcggagagctgactccctctccaacactgacacgaattgtcaaaagaggaagctgcatcgaagttcagccatgtcataggcacactcttcaagagtcaggccctgctggcagcatagatgtactgcgcggacggccacccgccacagagctcggaacgcaggtaacacagaagcacccagcgccgcaaagtatcgaaatatggtggatcgaacacccgggactgaacattgattcaaataggcaaacgccgcgtggccgaagccggcgcttccgaggagccagttgggaacacttgacgcctccaacagctgattcatccgaggtgcgcacgatcggcaccatgaactcatattaaacggccatctccgagggccttacgcagttttcgtcgactccacgcagaagcctcccgggaccccggctccgaacagctcaatggattctctccttcgagcattagaggagatcacgcggtacgcatctgaccggctaatcaggaccagccccacgttcatacctcgatgtggttgtctccttcttctttgagaggtcagtcacgaaagttgtggacgacattttgagttgattgtcacttcgagaacgtttcccctctatgactgctccgagttaccggcttctctactcttatgcgtcccctcttatggaaagggcaaatcgcgccaccgtggtctgactgatcgcaacgccactgccgtcagaaaccctcaactaagcatcgataccccaactgtgggcacatctggctcggattccactcaaacgca

SEQ ID NO: 16 - DNA, 1402 bp, Phytoseiulus persimilis
  source 1..1402: mol_type = genomic DNA
  variation 188
tcacggtgcgacttccattccgaagttttctatgcattcagaatttgggctcccttcaactccttgctcttcgacgggcgtcaatcgttggacgaaccgtaacagacagtgaccatctgcaatccgatattccggatcccgctaatttcatggctcgatcaggttccttgtcgcaccgattccttcacacaataaatagtgctcgatgaggtgatgattcagagcttgaagaatctcaacgccttggccactttggggaccgctgattgcgataaactcgtgttcggagtcgagctcttgctgaagactgagtgattcgggtcaatcccatcgaaatatctgtccagggccaccgaaccgatctgcgcggcttgagaacgcttcacgacgtagtgttgacgcgaggcctccgtgtttggcgtcgggtttatccatctggggagagagaaacaaacatttgaaatcacaggcccgatgggtcgaggattacgcttcagagacgccgagagttctgccaagctaagatacgcgggcagaattttttgcgcgtcggagagctgactccctctccaacactgacacgaattgtcaaaagaggaagctgcatcgaagttcagccatgtcataggcacactcttcaagagtcaggccctgctggcagcatagatgtactgcgcggacggccacccgccacagagctcggaacgcaggtaacacagaagcacccagcgccgcaaagtatcgaaatatggtggatcgaacacccgggactgaacattgattcaaataggcaaacgccgcgtggccgaagccggcgcttccgaggagccagttgggaacacttgacgcctccaacagctgattcatccgaggtgcgcacgatcggcaccatgaactcatattaaacggccatctccgagggccttacgcagttttcgtcgactccacgcagaagcctcccgggaccccggctccgaacagctcaatggattctctccttcgagcattagaggagatcacgcggtacgcatctgaccggctaatcaggaccagccccacgttcatacctcgatgtggttgtctccttcttctttgagaggtcagtcacgaaagttgtggacgacattttgagttgattgtcacttcgagaacgtttcccctctatgactgctccgagttaccggcttctctactcttatgcgtcccctcttatggaaagggcaaatcgcgccaccgtggtctgactgatcgcaacgccactgccgtcagaaaccctcaactaagcatcgataccccaactgtgggcacatctggctcggattccactcaaacgcagagccggtctcggaattaggattcagaaattttcctgcacatacctgtcttgagcgacggttttgga

SEQ ID NO: 17 - DNA, 1704 bp, Phytoseiulus persimilis
  source 1..1704: mol_type = genomic DNA
  variation 165
ctcgacaaagtgccgtctgaccggctataaagcagctctcggctgagaggtaaatcctcttcgcgctcgttcgatgactttttcgcgttcgctctccgtgtccttcccggatgtattatttatacgcaaatctgtgccgtcaaatgttctcctggggaaggagaaacccggaggacgtaccaggcggagaaggcttaggcagccagtctcatgagatggaataaatccgagggaaacgcttttcctctctatagcgcaatcgaaaacgatcgtcgacgatgatttccaaactttcggaagccactcgttcgaatcgttgccagagatgcctcacgagcagcgcgaaatatcttgacgatctcctcgcgaaggggagagtcgtaaacaatggagtggggagggggcgcgtggagcagaacaatccaatattaaagtggtggacccggctctcgcagctactcgaatttctgcgctttccgttcttagattgaacaaattcatctcaaaccgtcggaatcaagactgcgttccgcggagtcagcgcaatagaatttccggtgtcgcgtttctctttcgagttccctccccctccgagtggaatccaatcccgcgttggttattgaccgaagcctcatttcctgtggttttgcccgagcgacaatccatttccacggagtctcccgagccgagttcccgccaggagatccgaagccgagcaatcgatcgcggggttagggacgagtaaagtttcccgatgagtgttgcaaacgattctggagaaaacggttcgtggaatgccctccgacgtcgaatcgttgcacgcgagctcggaattccgactaaaacctcgacttttgtgagaaaatcgtcatctcgtccttgacagcgtctcccagcacatcgagcagcgtagaggaattcgcaatatcagatcctctcctcgcaagcattccaccccgatgctccgaaaagggggagcggtatctctgagagttaatggagaggcgcgatagtcggtataaccaaaatcaaaatgatacgattcagaataaggatgatgacgagtcgtttatcaaggtatagatttcgggtttcgaagcagaactgggctcaaaggctcgaaagttccggacgtcgaggatcagctcaaaggaatcgaagcaacggaaggaaggaattgtgaagagtgaaataaacctccgttttggggagattacgctttcgctcggaacgatccgcaagctaggtgcaccgcgcttcaaaacctccgctaagggtcccttgccacggacagcgaaattgattcctcgattgtccaagttggaacacagaagaagttcctccgacggcgccgaatgggctcctaactcttttttccgtctcaaaagtcacgatttcagtccgacctccgacgtccagtaatttctttccgttccggaaatttgtgcttcccgagtaggaagcagagtaactgcccgctccgagacagcgaatcatcaccagagaactccagcggctaaccgaagccgattagtctaatttcgttgtgccttgaggagtgcacagttgggtacgcgaatcgactccccgtaagccgagcggtgacgactgcgtcttcagaatcgctccgtgaccgatagaggccggaaagggcgaggtccgcgttgtcttggtcgttggcgacgctgtgtcccccttattgct

SEQ ID NO: 18 - DNA, 1938 bp, Phytoseiulus persimilis
  source 1..1938: mol_type = genomic DNA
  variation 183
gctcatgtcgaggctctctcgtttatgggcggcgacaaaggacattcaggagctcccctcaggcgttcttttgacgcaggacattcttatcctctctcgacgcaggccggattttctcggaaacgaaacgcactgagctcacggaacagctgtcctcatgagagcttttccgagaaaggaatcccagatgtgagttcggggtgtcggtagctcaacttctaaaggtcgaggcagacgcgccgaacgaggaaacagccgaacggtgtcaccccttgagtctccgaggttttcctcgacaaacgagtagaacggaggattgtttggaccctgctgtcgaactgttcgaaccgagaagcctcttggggttgtcacgagagctcgaactcgttagcgaggagagcgggcgtcgtagaaaacagcatcggatgttccgaaacttgacgaaatactgcgcgtccagacaaagtcagtgtacgtggcgcgtgcttcccgaccatgcacgtgattccgcccacacgagctcgttcacttaccttggacgttcggacaacagggctgcctccgatgaccgctcgggtcagcgctccgttccgatgccgcgaacgattctcacagcgagccaatcttcagcacaccacaacaacagagagcgttcaccacacgttggttgggaacaaacgttttcctccagtgttattgtagttttgcagggtaggggcacgttggagtctaccggaccgcagctccctcactcgccccccggaacctaagccctctccacttgctgtggaccctcgaaccacgacacggcggagagatccccgcaaacaccgaatgacgcaacgactcgggtatatccttgacgaaggtcggagcgggcgcactattagtcattgagcggcgcctttcgacggaacgaatcgctggggggatgagcggagtgaatccccccagcggcgaagggctgcgtcgagagctagaagcagccagtccttcagaatcggacttttcgaaactcaatttgaatttctgcgccctttcattgcagcaaagtcgtgttcacacggctcctggagcatcggcgatccaggagagctcttgagcgcggtatttcgacgtgacatccctcgacgagtgcctcctctctccgaccgcgtgttggtatagacaggcggcactttttggaaattcgttccatccttggacctgccagaggagctaggggagttccggccccctccctcgctaaatgagcttgtgagctctgccagaacctgatcacccggacgggatcaccgagcccttcattggctccgtgtttgacacgtttcgctgaggctttttacggtcaatcagagaatccctgcctcgaggcgaaagctacagcagaaacaccagccatgtgaagtagagtgtttcccaagctggacattcgcccagaggcttatgagcaaggaaaacatcggcgctctatgacttcttttgccgtcgaacctactttgacggtagttctccagctgatatggttcgatttggacaccttcattgtgacaactgctgatcttgagcccagcaacagcgtgccctgcaagcggattacgtcttgccgcttgaagctccgttgccgaggaacctcagctgaggtcatgatccgcgctaatctttttggttcccgattgtggtcactgactccgggaactgcttggagagcatgctcaacacactcacctgtatgaccacattttgtcgtaccggcatgcgacacgcaatgacgctcttaccgattagagatgctgaaagatcggtcgagcgattttggtcgagtgaacagagccgagcgatacacgagcaattttaccctttattggaggactttcctctcaacttgcgagcagtgactttgtttcactcaaaagtctcccgaactccgaaccctat

SEQ ID NO: 19 - DNA, 1471 bp, Phytoseiulus persimilis
  source 1..1471: mol_type = genomic DNA
  variation 133
  variation 182
gtgtggttgtcacaggggatacttcggttcatacgacgccgcattcatgtttccacagataaaactcgatattggacgcaatccataatttgtgtgaagatctcggtcacagcacacaccgattctgcagtgcaggcgaacctggggtcgaacgcgaacggtgcttttcccaccagctggtactggtttgaccagcgtctgctcggagactaaatgaatattacacgagagggaagatgctacctgcttcgagagtggactgtcgtcacttatgagtctcatgccgattcataacaaactatgatggaacaatagtgtctacacttcttgagttgatcaccaacaaaacagaaaaaaaaaacaaaagcattgttacgatgaaaatacggggtgaatcttccgccccgttctgaagcagatttgattcgcggcggattgattattcgctcaaaccatcgctagatcctctactgccccgtaattgtcacccgcaaaagaggactgaacccgaagctcgtgatttgcttcatcgaaattaaaatttgacagtcacctgagagatgatgagcgcatgcaggcaaggctccatgtactccaccctgtgttcgtagatggctggtagttcggaacgcagcagagcgttctgagtctccagatcctgattggaggtttcgacctgtcggcggcactcagcaagcttggctatgttgtttccttcggatgaaaaacccaagttggaactccgcaggttcggctctgagtccgatctctcggttacggcgctacggattcaggcttccgaagagaacggcgcccagaacgtctcaatgaaatgttctcatagagtcatctcaactcaccagtggcttctttggtttcgagctttgcaactttttgcgcaagtcgttgatgttcctggacgagatgatcccgttttttcagagcgacttgcacgtccgggaaagtggcttgataacgtttcagaggatcaaccagacagcgtctcaaagcaatgacgtgatcttctacggcctgatccatctcggaagcatagcataaccattcttctatagttctccgaaggtcgtcatgttctttgcagaagtcatcgttcaccaaatcggaacacaactttttctctgactggtaaagcgctgttggggcgagggaagagaactcacttagaatagagtcttccggccgtcaggcgaattggcagaacccaaggctggtcactgcactccacattgagccttgatccgaggcccgattcctaccactggatcccgactcggaatcattgctgtcgcggaaactatcggagggaatcaagtcgagtcgagaatgtggttggaaacaccaaccttaaaggaacacttccgactcatgtgaaacgtccatgaatcccaaatcgtcgcttcctcactgagcaacacacgcaaccaacccgggacgccatcgactcacctag

SEQ ID NO: 20 - DNA, 2196 bp, Phytoseiulus persimilis
  source 1..2196: mol_type = genomic DNA
  variation 146
  variation 323
ggcgatacagacaacgctctggagcctttgggaaagtagacgttgctgagcccactgcgtttcacatccacgcgattcagtctacgtctgcatgttgtagcagtcctgggttgacacactgctcgtccgcatctctttcgggaaatttcgcccagccaagtttttctgatgcgtgtgtcgcatgcagggtgttggcttggccacgaccagttaaccgactagagtctcggaatctgttcgaggaactgaggttgagagtgacttatcgaatcggatggaaggagattattctccttccgttcgcgtaagttgaggtgctcgagaccactggcaccggtgccatctactccgaggagggcgaacgttgctgtactcagaattcctaggatctattggtcttatacttcggaataacgcagaaccttccgacttgtgagaagtgaccaacttctcggtaacgtttcggtccctctgaagtactcacaacctcgtctccgatccccgttcgtctccagctcgcgtattcatggaatttccgatggagggagaggaacagatcattttggcttgcaagatgagttatgggatttcttcaatatctcacgaacttgccaagcgtcagtgggctgatccgaactgtcgcacacgaggagatatacacgagctgcttcgtttcgatagcgaatttttcgaatctcgcggtatcgatactgaaagtcgacgaattagctcttagcatgacccgggatctcacaatgagctgctcgccaatcccgccaatcgatgagatcgcagatgaatcgttgacagatgttctggtttgagtgctgtcagcgctgctgcctaaagcgggtctcagttggtttgatatgagtttgtcgttgaatattttctcctttcgctctcctcgatatcttcatgtctttgacctggttcggaccgcggcatggtctccctttccaatttcccccacacataaggtgcgagatgttttgcaggagctcaagtacccgaaaccagatgtgcagcgttgggaaggccgaattccccgacagcatcggagggaagctcttcgttcgcccctcggctccctacagcagtgcagacatgtcctcgaaatcctagcttaggtcatagatccttgatttcgagacagttttccggagtttaaaatcgactccatccgcatatatgcgcagctggaaccaataatcgcctgagcaggccttcattgatgaaaaactctgggttggtagtatctcatactatcgctcgttttgcgtgaaaacgtggagtatttgaggctgtgttgtcatcggtgagctccgaaacggtcattattgctgttagtatggtagtttgattcaattacagaatgagagcgtggtgcactcaagggataatgatttccttcgagtctcggtgtcaatcgcgatgtcagcagcaattcattgattacttcttggggcagttcagtggcccaccaagcttcgaggcgtacttttgcttcctggtgtcggcgagcgttgcatgagtcgaactcagaatacgcttcccgatgtagtcgcgtgtttcctcctgactcaggacaacggctcgtcttcattttcgtcgattggcctgtgtgagcctcccggggggtcagtgtggcaatgcgtttactgtcaccgatgacaagaatagtctgccggcgtttgggctccccttgacaagtgacatattatggtggctggacttcgtatacgatggccacgacgtccagtactctattcgactccaatgatgagagttctcccaaagtgcgattgttgagcttcagctgggcggcaagcgactccatccgcatatatcgcagagagctggaatcagttatcgctcaagcaggccttcattgatggaaaaaggaaaatcggcgatcgaactcggataagatcatctttctgaagttcggagcttcggttgagcaagcgggggcaagaaaaagagtgtcagagtctcgttgagctccagcgttggtttccgctcgtaacagcgaggagtagattaaggtatcaagagtcacagttcaatgatcaactcacggcggagtggatgagaaacttcactgagatcctgtgttcgacaggacgaaccgatagccgcactcggagctcgagatcaaccatgtttcacgagtctcctacgattcgcgggtac

SEQ ID NO: 21 - DNA, 2298 bp, Phytoseiulus persimilis
  source 1..2298: mol_type = genomic DNA
  variation 241
ctgtcgcacacgaggagatatacacgagctgcttcgtttcgatagcgaatttttcgaatctcgcggtatcgatactgaaagtcgacgaattagctcttagcatgacccgggatctcacaatgagctgctcgccaatcccgccaatcgatgagatcgcagatgaatcgttgacagatgttctggtttgagtgctgtcagcgctgctgcctaaagcgggtctcagttggtttgatatgagtttgtcgttgaatattttctcctttcgctctcctcgatatcttcatgtctttgacctggttcggaccgcggcatggtctccctttccaatttcccccacacataaggtgcgagatgttttgcaggagctcaagtacccgaaaccagatgtgcagcgttgggaaggccgaattccccgacagcatcggagggaagctcttcgttcgcccctcggctccctacagcagtgcagacatgtcctcgaaatcctagcttaggtcatagatccttgatttcgagacagttttccggagtttaaaatcgactccatccgcatatatgcgcagctggaaccaataatcgcctgagcaggccttcattgatgaaaaactctgggttggtagtatctcatactatcgctcgttttgcgtgaaaacgtggagtatttgaggctgtgttgtcatcggtgagctccgaaacggtcattattgctgttagtatggtagtttgattcaattacagaatgagagcgtggtgcactcaagggataatgatttccttcgagtctcggtgtcaatcgcgatgtcagcagcaattcattgattacttcttggggcagttcagtggcccaccaagcttcgaggcgtacttttgcttcctggtgtcggcgagcgttgcatgagtcgaactcagaatacgcttcccgatgtagtcgcgtgtttcctcctgactcaggacaacggctcgtcttcattttcgtcgattggcctgtgtgagcctcccggggggtcagtgtggcaatgcgtttactgtcaccgatgacaagaatagtctgccggcgtttgggctccccttgacaagtgacatattatggtggctggacttcgtatacgatggccacgacgtccagtactctattcgactccaatgatgagagttctcccaaagtgcgattgttgagcttcagctgggcggcaagcgactccatccgcatatatcgcagagagctggaatcagttatcgctcaagcaggccttcattgatggaaaaaggaaaatcggcgatcgaactcggataagatcatctttctgaagttcggagcttcggttgagcaagcgggggcaagaaaaagagtgtcagagtctcgttgagctccagcgttggtttccgctcgtaacagcgaggagtagattaaggtatcaagagtcacagttcaatgatcaactcacggcggagtggatgagaaacttcactgagatcctgtgttcgacaggacgaaccgatagccgcactcggagctcgagatcaaccatgtttcacgagtctcctacgattcgcgggtaccttgctcctccttgtcgctctgatcgatcggtactcgttgatttgttgcaccacagcgtaaactttgggtactgagtttccaagtgcgccaaaatcttcccaaataaatctcaagggaattcaaccatatcagcagaacggtgaatgttgagatactcaagtacgcccaggccgtcggtcgaagcgttccccttggaggttcccgaagattcacggcggctcgagccatggactcgtaactcgcgttctcgaattcagtcgcctgcttggggttcttcgcgacttcgagccgtaacgtgattgcctcagagtcgattacgaattgacggaacattttgcaagcgaggagaaccgttagtccatcgatgaagttgtcggtgtaagaactctgtgagactgagtttattgtcgttctctgaaatcagtcctgagaactcctgaacgagctcatcgattatttggaactatgtatagtgccctgttagagtcctcctcagagagatattgagcctccctcgaggaggtgggcctcaagataacggaatctggcagttgctgcgcagagctgcagtaactcacgccactagttcagtttggagccgttcatggagcatagttttgcggagcggttccccactccgtgaaattggtgcctgtgacgaaattcaaggctgaggaacacgcttgttggacgaagtcagcgcgagcgacacttcgtcccttccagcaacctctgag

SEQ ID NO: 22 - DNA, 1941 bp, Phytoseiulus persimilis
  source 1..1941: mol_type = genomic DNA
  variation 236
  misc_feature 866..895
ggtgctcgctttcgctattgccgccggagacgaagctctgccctcgaggtacgaaaagagaacagtgggactccgaaagggggaggacgaacgctcggcctgtgtcgcgtgaactgaaaggctgttggggacagagttggagccttctgtggagagtggagccttcttgccaaagcgataaccggtcgcccagccggccgcagagtcgacccgccggccgaaaaggcggccaaacggttgcggtcgttgtccagttggcaagcgaagaggcaaccggttgtctccttcatttttcttgccgccctaccccgcttcacccagtcccccaccgctcgaagaaaagtgagtcaactagccgacgagcgaggcagttggttccgaacaggccgtcggtcactcaactctcggctgcgttgcgccgaacgcttttattctctcacccactgttcattccttcgagcgaagtctactccggggtttttcactcagactcgaaagcgtgaatccgctctgcgcggggagaagaatcaaaatccatcgagaagaccgaatcgtgcagcaaatgatgaggaaagattatccagaagtggttttcgagctacatctcaatccatgctttcggagaatcaacgtgccctcgcaccttctcctgtatcccttaactttcccctcgaatgtcgactgagctcgctcgtttccccaccgcgggtcggccgagcgctggatgatgttgttgtttcaccgccgctcgcctttccggctgccagccggctcgcacagacgggggggggggggcaagcgggcgagcaacaaaacagccaactgtctcgtccgctggacgggagcttcctccaattaccctcttnnnnnnnnnnnnnnnnnnnnnnnnnnnnnntgcccgtccgcctacccgcccattcgcccgcctgcctgtctgtctgctctgttggctggacggacgacagaccgaccgaccgaccgaccggccggccgaccaacgaaaaagactgacatccgaagtagtagcagcactgaaagtgaggcccagggaggaagagaaggagccagtcagtgagctccggccatggtggctgaaggggggcgggggagggatggaccgacagggacgagaggtgagcgagcgagcagacggacgaccgaggaacgacgaacagcaacggaagggagatcacttcttcgctcccacgttgtcgtcctcttcgccattcgctcgtccgccggctccccgttggtctgtgagtccgttgattcgttccatggtgggctcgttgaccccccgtccgtccgctcggtcgctcgactggctgtcgacttgttccgtgccctcgagccagtcaccgacgctaggcaagtagacggtcgtcgggctgggcgatcagacgagcgcaagaaccgactgtcagagcgaaccggcgggccagccgaacgaacgagctcaggctgtggaggcccggctcgggttgcttcggctcgcacatatttgtcgcgccacggaagccatggctggggcggcgccattccgccatcgcacccggtcgacgagcgaacggccgcacagcggaaagcggacaaacgccctggacgaacggcctttgcgtttcttacgaccgccactggtcgagttactgcctctagcattatagcgcttctaccgctaccaccgggaggatcactgcttgctttcgtttccatgagcgggacatgagctctcactcctcgtcatcaagtcctgttgttgccttcctcacttgccgagtcctcccccgccgcctcctgcgcttccagcgggcgttcgcagcaacgaatttccactcccgatggaatcccagtggttcgttgtatggagcggttcgttgaaacgagcgactgtcttttttgactcataattcagggcgtcgagagcaatgtagccccgtgaaa

SEQ ID NO: 23 - DNA, 2018 bp, Phytoseiulus persimilis
  source 1..2018: mol_type = genomic DNA
  variation 199
tcgcctgagagaggtactggagaggaatggtatgcctaaaaccttaccgaaaataattcggcacccgcacagggagaggagaaaaaacgggactcagattcaaccccgataaaaccgcgattgtagaatcagctaaggtaaaagactcaacccagaggaaacactccgagtacagtatcaattgataccggtactcgaacagtgtaaggtcccagggcccaggaatgacgctctgtaacaagaaaaactacctccaagaacagggagagatctgagaggaaaaagcagagggagtaatcagacaaatgcacgtgaaatcgctgtggagtttctatagattcggagtcaacaaaatctaatgaaaaagcacggctgttccagcgctaccgtacgccaatgcggacacaaccatgcccgttgaattgcagaaacggctcaaaaacctgcgactcgaagcgggaagacgggctttgggacaaccgaacgcgaacaccgtcgtcgactacacagacggagaatcaggatgctcatccttcgaggcacgcggaacttatgcactctggcagaacagacgaaatggatgaagccaggtggccaaaagcaatccatacaatgctggatatcacaaggatagaaacctcacttaagagaagaattgaacaggtcaagaaacgattccaatgcgaagaattgaaagaagtatcaagcggcgaggcgaggatgggtctcagaagcaacaagaaatatgttgaagagaggctgagtaataagctggatagggagtggcgaaaggtatgaggtgtcggggtgtttcggaaaagaaaactcttgcccgatatcgtcgttccaaaaaaattgaggaatcattgaatacatctatgacaaaagtagaggcagcaccgctcgcgaatgccagagcgggatgtctacagactaggaaatacaggtcaagatacataaacatcgaagcgacccgctaaggttacggagaggagtgtgtattacgggaaagactaggactacacgaagagagcacaccgagaatgatatccgacaccaagagaacgcttcagagattggacaggacaaaggacccagaccgtatgtcctaagatacgaataaccgcatcgtcgaccagctgagtcatcgccccgtatcaagggttttctgccatgcttgaaatgaagatacagcatgaagatggtcgataaacaatcaatcaaaataagctctgagatctctagcacgacatcaatagctccaagctgttcttttttttttggaggaacgactcacaaaggcgagaccctatgattcacaacagaaactgtgaatgcggagaaaatacaatgggagcgataggatagccatggtggggaaaagctttacgaacgactcagaagaatggaaaattcagctgcattgttggtctcatatgcataatacccgtcaagaaaaacctacggctcattatctgggaaatgggatgggatagatgcaggaagaatttgagattgtatgttggagggaagggtgttccgaaggcgagatgcgcgaggggaggaagtggagtcatactgagcacaacgattgctgaataattgaacagaataggggtgttgtttggcactacgtctggtttcaagaacgggggccgaagagcagaaacctcgttgtttgatgttatgttaaggcaggtgagcttcgtgattcagatggccttgagattcagtttttccccacgcatcaattcactgccatttggtccaatatgaattcacgtcttgagacctggagacttggcaggaattcacagcacagcgtctggaacgccgatcgtactctatttatcctatcagatcccggaattacgccaattcccggggtacaaatgatggcaagtacaaagcaacttcatattttcccaagaagtgtggtcaggtggatcctagaacctcgcatgagcttctcatatgggtgtgtacttccctgcttaattgattccactgcgtccctc

SEQ ID NO: 24 - DNA, 1779 bp, Phytoseiulus persimilis
  source 1..1779: mol_type = genomic DNA
  variation 185
ctgggattcgctgctctgttacatgatttctcatactctccgatagcatatggggctgacggtgaggccgtacatgagcagtccaactttgaacagagttcctagaagcgaaaactacagcctggatatactcttcgtccatgaccttcccaatgatgttgagatgtcgtcgttctcctctcaatggagatcagagggagccgaatgagatgaatttgaaatttcccgctgggctgcccggagcataatttcgaatattccatacccgccattctctcatctgcggtcgacggtgaatgttgaagtacttccagactaccagtcagcgacgtcgcgcaagaaggctgccgcgacatggctcatggaataaggaaggagaagggtgggcagcagcgacgtacatctgaatggacgtgaaactacgacgtctacggaattccgtgggagggccaatgcgatttcaatgctgttgctggtcattgaacagaaatggaatcagcagcgcagtccatccctatagcgcgctgttatcggcgagttctgaggagatcgtgagttgcgagcgcgacgaaacgtcatgaaccatgatgcatcgctcgttcaaagtagctggggagagcaatcacgcaagaattcaactcatttgagttatgactcacttggtctcattccaatcgactcatccaatccgcaagaccgtgttcccttccgcgccggacttctgacaatcttcgcgacaaattgagtcgtaccttgatatggtaatcaaaatttccgaccaatatcgacatgttctgggggctttccagagctgaccttctgaaacctaaacttcccgttgcggcgagatccgacaagcattattcgccactggaatcgatgaagaaatcggactgcgcaggttgccggaaaccttcattggttgtgttggatcgttggggctcgtcagcacgcattcgcgagtcaaggtgtcgctgttggagcgaagaggaatccattctattctaacctcagagaatcaccgctgctccaagagatgcagagttagcccattgtcgctgtgacaagtctcgccttaaccacaatacgcatgaaaggaggatgtgccatcgaggatgttcttatctgtgacgaacagcttcgtcttgtcgcctgtggttggttcgaattatccccgctccattctttaccgatatgggttggattggcttccggacccgcaatttcaactccgacggtttcgctccggcattgaaaacagcagttggagtatcattgaacccgggcttctcccaaccaggacggctttgtggtacatctcgcggaccgcctaattgacgtcctgagcggctttctggacgacgaacatgaggtgctcctttcgcaactctccatgatcacattgagttttctcttcaacactcgagtcgggacatctcagctcgaggcggagtgtggtgattctcaaagatggttccgggtccgcatttagtggagcagccatctagtttgactcgcataactaatgtgctcaatacacggctccttcgaatctcttggactttgcatgcaagagatcgatagggcgttccaatggagactgagaggagcacaccgtccgagccttgccagtgtccatctcgctttgacgcctcttccacaaaacggctctctcgaagtttttcccatcgaatgtcaagattgtccgggatgatcccaacccatttaaaatcagagtgatcctctcggtgcaccggaggaatcgagcgcctctgagaa

SEQ ID NO: 25 - DNA, 2654 bp, Phytoseiulus persimilis
  source 1..2654: mol_type = genomic DNA
  variation 158
actcggcgaatcctacgaacggaattctgaaaatgctctcgtccatctggtccaacctctcggaagggaccggagaagaaggatacctcagctgcgcggctgccgatgcatccacccccgtgaagatgggtcaatattggaacaaactcccgttctccgaggagacaaactcgggacaactccagatactgcggatgaaaaccccgaactttcaggacacagacaaacactgtctattggttcaggaaaaactgcccctcctcttttcacccctcctttattttgccgatttccgtctcgtcggagggtcggtggatcgcgcgaggattcaacgcagccgagagacgtccattccgtcgatcagaccagcattctttttcgactggtgtcatgttcgtatcagtcgacaggagatgctgagctcggcgcgttgtttgaggatctcgagccatctgacagaatctcggatccccatcaatacgaaacacttcgatagatctgagcggcaaccgcattgagcggagagtatgggcggtgtccgatactcgatcagctcccggagtcaagttttacaatactggcccaagcgaaggcagccacggacggaataatacatctcaacgagttctgacagatggaaagggatgaaaccttcgacaacgcttcacggaaagcagatctgagacagctcctcaaatgtcgtacgcgtgtccgcctgcgtgagttttcatacgcaaatccatacgagagccatgcatgctgcgctccgtgcccatagcttgagcgccgcccgaaattcgaaggcactgtcggaacaattcgtattgataccgaacctacggtacaatcactctgataccgatccgtatgagtctgagcgggcggacccattatccgggtgagcggttcgcagtgcaatacatcgcgcgttcatgagccgaggtcgcaaagtatcagacgagaatctgcgctaccgactctcgggtgaattgaactccatcaaatcctctctccttctcgaggaaataaacgaacgcagaagttgagtggagcgaacgaagtagtgcacgcggtgcaaacgtcattttttgatgaattgctaaattctccggggcagaggcttccgcgttcgattgtgtatcggtgaagcggtgccgtgctcgaagctttgaatgcgtatcgaggtagttaattcgcttaagccgggtttaataagtgaacttcgctttccgtatcctggctcgaacggcccactctggaacttgacgcacttgcctgatcgtgtttgaggttgtctgagcacgcagctatctccccgtaactcgattcgatcaggaactcggagtcgtttattcgactcgtttccgaaccggagctggttagttcgtcgtagtttgttggctatatatacgttggcttcagaggtttgacgggacctctcaacctgctggacctcgctctaagagtgacgaggacggactgcccgattatctgaaggctgccaatatagcctcttcaacgggctgacaaaaatccaatgttcaagactcgtgaatctgataccagtttgcggcagcgtcaagatgaacctcgggatcgatcgctcctctctggttcacatggtcgaaatctgttcaagctcatactcacatatgaaggaagggatccacctcctgcagaaatggatggattgagcgagatttcgacaacactgcgttcgcgcgtccacagcatgttcgtcttcacagggacattatgaatacgtatggcgagtatcagggatggaatcgtttgagaagctccgaaatccatccgagcattccggaagaagcccctgtcgaggcgtgatgtgcttacccacctgaaacaccattcatggtttcgtgcacggtcgtcgtgcacgtgttgaattatccgcttggggaaccgtgcgcccgatcgcagctactcgggggaggacgtttcctcctgctccagagtcgagcatcacgtcagtattcgagtacagttgttccccgctcattcgcgcttcggtgctcacgacctcgcttattcgcggtttttgaaaatcgggacacatattctggagggacgaccgcagtcgctgggatccggctcgaagcttcaggatgcttgttttgattcagagtttccagagcaacgcagcaattcgcctcagaaactttgatagccatgcactgactcgaaaaagtgattaagcgtatcgcatttccggcttctgaagctcatagctcctcaacgaagaggcggatggtttcgcacgagatcgtatcgttaaggtggactctctcggtgtagaaaagagagaaacattgctcctgattgtgttctacaagcatctgaggccgagcggtgtgacactagaacgtctcgcggaaaccatcagaatagcatcgcggagacccggatctgctccgtagctccagttcatggaaggagactccactgggggagacatcagagctgtcctatctcaaaatggggcgttctccagaatgagatatcgcgaaacggtgaaccaaaacgaaaattcgctattcgcggaatgtctcgaaatcaattagtcgcgaatgacgaggaacgactgtagttccgattggagaaattgcttcgatgtgattccggcaccttgt

SEQ ID NO: 26 - DNA, 2094 bp, Phytoseiulus persimilis
  source 1..2094: mol_type = genomic DNA
  variation 143
  misc_feature 1488..1580
tagcataactgaccagccgcacagcggagcattcccgacatcggaccttagactacaacgatggatggatttctggccccatggctggttttagtggtgcgcgtctgttgtccccgccagacaaaggattgcttgctcggtttgctatgcatcggccctgaatcgcccattgtgattctaccttcaataaggggccgtggcggtgcgcgcgttcctctttgaggattcgggtgacccgagctgctagccctatccgaacgcacaatatcgcagagcaacgcttaagaacaccggaatgcgctctgcgtttttggctccgacccaatagcgatcgattcgcggttcaatcgatcggaatatcgctcccactttgaggagagttaaatacaaagtgatggagtttgtatcgttgaggaaacggcaatggctgatgacaatgatcacaaaccattcgtcaggagagagcgatttcatcccgattgagttgagaacgcggcttcagacttgacgtcttggagaaattctcgcttcctccctccctcccattgatatgagccgagtaggaggggcaggggggggggaaaatcttgggaaaggattccctgataccaagcagtgcccccgctctcgatcatccgtgagaatcggactatttatggtacaaaaattggggaactatccgaacactttcctcataaatacctggtctagtggcgacactaacgtctgggaacggacggacttcctgcgtgtctgtcgttccgcccgccggtcgctcggtcgagggtttgtctgtttggtcggtttcgaaggtcctgcatggcctgccggaccgctttgcataaaaacaagccaatttatcggcgtgatgtctgagcgcgcttgcagcactgcgccacgagatttgtgctgcgtggttcgagacggtgcggaccaaacagtgcccgcctcatcctcatatttcgtgatcgtcgctgtcgtaggggttgttgttccgcgataggcgtacggctctcctaatctcggctgttttacgactgtatgctggcgttccttgggcgtgtggtttcgatcagtcgcgattccaagcgtcggttgaccgagtctagcagctcctccgattaaaactgacctccctccgtggggattggtcacggggcacaacaacaaacccgtaatcagtaccaatcgaagtgtctcatcttcaaacttcccagttgatgccgatcgaatcggtcatccgaatgttctgagatgtttggttgggtcagatccttcgcgacccaccttccccgatcacatcacgtcacggaatcttttctccctgggctatgttggcgctcattcccgagtgatttgcccgactgacgacctcagttccttcactctgcgtctcgtgtttctttctgtcggaaggtaggtatgttcgttcgtttgtttgtttgtcagtcactccgcacggggcgggggggggggggctgactgtgnnnnnnnnnnnnnnnnnnnnnnnnnnnnnnnnnnnnnnnnnnnnnnnnnnnnnnnnnnnnnnnnnnnnnnnnnnnnnnnnnnnnnnnnnnnnnatctgggtagtggtagagctcacccgcctgcctggcctgctgggtgagccagcaggcctgcattggagggaagagagggggaagggggccgtcggggaagggccacgcgggcgaggggaggcgaaaggatccgcggagagggcacacaacaaggcccctgccccgcgtaagatctgcgaatcattcgaagttgttcttccagagagatacgtgctgaccatcagcggtgttgttccgacccgctctcgagccgaagctgatcagccagccggctggctctaaccccaaacgaacatttcatccggcgggagatgctctgagcattttttcgtgttcccctcattgacaaggtgagttcactctggtgtccggagtccgagaggtctcggccgtctcggaaatttcgccgccctgataatttttaaggatctctctcacgaccctggttccagcagcttgtgctttgaatatttttcgcgcgtcgacccactgccgtcatgcggattagccgaga

SEQ ID NO: 27 - DNA, 2280 bp, Phytoseiulus persimilis
  source 1..2280: mol_type = genomic DNA
  variation 157
gcagccagatataccgcgaaggctcgcggcgtgaacgctccgctgaaccggcggaaaactttcacgcagcgccgcttgaatatccaacaagctgaaatagaaggcaacagcatcctccactttcctgacggatgccgtcggggttctcggagagttccccgaggcattctgaggtgctggaacctttcgctcacggtgaggagacgttcatagatcttgccgcagatctcttccgcgtcccatagcccaaactctcatagacttcccagtcggagctcccgtattttcctcatatttccctcatcgtctggttgttatggttccctcgagattccccctcatggttttcgcatggtctgcttatagccttcgctcagttttgccatatcatccgcgaggattcgagcgacgagttctctagcggagctcattgattctgacggcgctgtagaggtcacttggctgtcgccacccaggagagcgattgcgtgcagttctccgttatctgatctggagtcttcttgtaacgactctcttactatgggaacaagtcgttttgtcgtgcgcgcttcaacgtttggagttgggagggactccaatcgtgtcatttgtgtcggttggaggggaccgacgctcctggaaaagagtcggaagatgaattgaggacaactttcctgtcgtttctccagtattcctctggtctcgaaacatcccggcaaccgcatgaatcgaacgcgcgaatcgcgttgaggaacggccttacctccgcctcgccactcccagaattatgcctcgtcacgttccctgtctggatggagtcttgcagcggacgaagcacgatctggtcaagatcccagatttcattttagaccgggcctgcagccgactgtccgtcgtgcgtcaaccgattctaatatgggagacggtgcgctgcgactcgtgggccagaacgcgaaatatgagtttggctaaggttcccgtcatatgagatcggaccaaacccagagggaagcttccagtcgacaccttctcctagcccctcgacccgagctgaagcacgaaccgaggagaaatcggagccacgatagaggtcgcacggtcaggaaggaagcacaccgaacgtacagtctgctcgctcacgtgatcggaccccctcgagctctgggatcgctctcgtcgctgacagggcgaattccagctgttcatgtgtgattactgagctactcgctcaaaaataattttgtccgatcgaacgccgacctgattcaatttcgcaaggagcagccttctgcatccgcgtcaccgaggagcaactcgatttcatttcattagatcgccggagattctcctccgtgatgctccgctgccgccgctgctcctagctcgcaagagctcaccgccattttgtgcgcgagctccaacacaaaaagagaacatcgacgaaagccgtaacggcagtcaaggtggctgtggaggatatttcccaagaggttgacttcctgctctgttagcgttagtcctcgctgctgttactgtcgccgttaatggcgttttcgatccgtaattgattgatctagccatcgcgaatagaaatgagagattcactcgactgggaaagagtccgcggagtgaccgagcggcggcgacgacgactcgttgtgacgacacagagacagcaaatagcggttatcgaacacttcgaggggaagatgataccgggtcgtgaattccctcgttgtgtttgtttggctgttcgtgtttatgtgcgtgcgtgtgtgtgtttgccctgccatttgaaattctttgtcgtcccccatcctctaacctcaattgtttgctttcttccaggtaagccctgagcccgtgtgctcattgttgactcgaggaggcgaggacggcagctaaagatgtcacatttgtgctccgaacggaagctccatctcggcacaaaccaacgagtccttcgtggagttcgcttgcgccagggaaccggccgctgtggcggagttcttccaggcgggaacaatgaacgaattctcgagatcgccaggatgaagcggacgaacgcagaatcagggttcgtcgacgttcccgcagggtgtcaacgcaaacatcgagacggtttcgcagagaggattcactcaaggatgaggcaccatagtcaagccgactctcaaaggctgccagggatagcgagcagaggagcaaggcggggagctcgacaaagaaaaaggcgtcgccgcgccccggggcgctcgttcgctgtggaaaaactcgcaa

SEQ ID NO: 28 - DNA, 1932 bp, Phytoseiulus persimilis
  source 1..1932: mol_type = genomic DNA
  variation 161
ggtcacgccgaatttgtgtcgtaatgaaacgtctgcgatgcctctggagaagagcgctcaagcgactgtgtcggtcggtggatttgttaggcggtcgtccggtgcgcacagaattgttcggtcgtgtgagcacgtcatcacgagcatggtcacagcgagtggcctcgacgactcagccgccctgatgccctgaattcgcagcatctggccgcagtggaagtgtggccaagatgagcctcgtggccgtttcggcgaccgggtaatgggctccgcagatgagaagctcgtcgcagctcgaacggcgagcatcgtccgatccaaacaatatttaactttgtatcgattcccgtcagaaggccattcgttccgtgcctgtccactcctgcctcgacccgtactctgcgcgtcaatgctccaaggagcgaagctggtggaacgggaccaggccactgtcggagacctgcgtggaggtgcagaggagaaacggggccaaaggagtctgtgcagcacaacgtttgtcgctccatttcctcgaacaactatgctgccttgtgctgcagctcgcgacgcgtcaaagcggcgctcgaggacctcgcccgggctctcggcttcgatcagttcgcctctgcggagaagctgcgcgagcaaattcggcggtcgccttcagcgaagccttggcttactgtctatcaccggcgatttctctcaaagttcgcgccaactttaaaccttttctggattctcgcccgtccccgtcggtataacgcgaggaataaacagcactcgcgtcgggagtttctccacggattattctttgcgaggagcgagagcgcgaaaacttggttcgcctgtgcctcatccgcaagccgcttgcgccagttcctcacgccaacaattttgatcagtagctgaaggtcatgaagcacattatcggaaggccccacagctgctcccgatcccatcgattcctgccccgttcaggagccgtcgtcttcatgacggcgactacatacagctccagagccaagcggaaagagttcgtctctttgcggtccctctgccagcgccattgttttccgcggcattcaccgcgctggcccgagagagatctctcttccgatgcggacgcttcgctgtaagttcccggatgtcgcagaagattccgacgcagtgcaggcgcggtgaggcaagacgcaacatgacacaacgagtctgcgtgaaacgaagccgctccgcgggacgaggcgagcgagcaagggcctgtggataggacagacgatgcacgactcaacagaacgagtgaggccgagcttcagaccgaagcaaaaagctatgttgtggggcgaggtgcgttgttgtagcctatttatatacaaatgcgcattctccgcgcaatttatgtgtgtaagcgcgggtctaagttgatcggtcgttcggcccgtgggagttgtgaaggcttttctctcggaccatccagcttccctccgtcgccttcctgctggaagaagtggatttgcatctcatgctgcccatccgccatctgacgacccacaccgccctgccaccgactggcttgctcgctcggctgccagcaaactcggccaaccgtcagccaactcactctacacataaattcgatgacggcccgacatgctgccaagccttctctgtcggctcgactcgagccggaggagaacggaggcggcacaagggaattcctgaaggaactaacacaagagggaggaagtgaacgaggagagccctgtgaaggtggatccaaggaacgagcctccttcggtcgctcgctcgctcgctcggctagaatagaactcgacgaagcaaagccgcgcgagcggagtgttctagccctgagccaagcgaaacagataaggacaggcgcttggggaggcaagtctccagttggtctgcctc

SEQ ID NO: 29 - DNA, 20 bp, Phytoseiulus persimilis
  source 1..20: mol_type = genomic DNA; note = forward primer SNP_1 for detecting SNP1
ccctgaccatcggttctcac

SEQ ID NO: 30 - DNA, 25 bp, Phytoseiulus persimilis
  source 1..25: mol_type = genomic DNA; note = reverse primer SNP_1 for detecting SNP1
tatctctttcagtcagttcctatgc

SEQ ID NO: 31 - DNA, 20 bp, Phytoseiulus persimilis
  source 1..20: mol_type = genomic DNA; note = forward primer SNP_2 for detecting SNP2
gtctaacacagagcgggcat

SEQ ID NO: 32 - DNA, 20 bp, Phytoseiulus persimilis
  source 1..20: mol_type = genomic DNA; note = reverse primer SNP_2 for detecting SNP2
gtggaaactccgatgctgga

SEQ ID NO: 33 - DNA, 20 bp, Phytoseiulus persimilis
  source 1..20: mol_type = genomic DNA; note = forward primer SNP_3 for detecting SNP3
gaacgaggctccgtgtactt

SEQ ID NO: 34 - DNA, 20 bp, Phytoseiulus persimilis
  source 1..20: mol_type = genomic DNA; note = reverse primer SNP_3 for detecting SNP3
tctgtgtttacctgcccgtc

SEQ ID NO: 35 - DNA, 20 bp, Phytoseiulus persimilis
  source 1..20: mol_type = genomic DNA; note = forward primer SNP_4-5 for detecting SNP4-5
aggtgtccgccaatggaatc

SEQ ID NO: 36 - DNA, 20 bp, Phytoseiulus persimilis
  source 1..20: mol_type = genomic DNA; note = reverse primer SNP_4-5 for detecting SNP4-5
acgggagacttgggctatct

SEQ ID NO: 37 - DNA, 20 bp, Phytoseiulus persimilis
  source 1..20: mol_type = genomic DNA; note = forward primer SNP_6 for detecting SNP6
acacggaaccatcccatcag

SEQ ID NO: 38 - DNA, 20 bp, Phytoseiulus persimilis
  source 1..20: mol_type = genomic DNA; note = reverse primer SNP_6 for detecting SNP6
tggaagaaagtcaggtcgcc

SEQ ID NO: 39 - DNA, 20 bp, Phytoseiulus persimilis
  source 1..20: mol_type = genomic DNA; note = forward primer SNP_7-8 for detecting SNP7-8
actcctggtccctgtctctc

SEQ ID NO: 40 - DNA, 20 bp, Phytoseiulus persimilis
  source 1..20: mol_type = genomic DNA; note = reverse primer SNP_7-8 for detecting SNP7-8
gctgaatagccgctccgtat

SEQ ID NO: 41 - DNA, 20 bp, Phytoseiulus persimilis
  source 1..20: mol_type = genomic DNA; note = forward primer SNP_9 for detecting SNP9
aacgcttccagaccctcatc

SEQ ID NO: 42 - DNA, 20 bp, Phytoseiulus persimilis
  source 1..20: mol_type = genomic DNA; note = reverse primer SNP_9 for detecting SNP9
tttcggaagaacgcgacaga

SEQ ID NO: 43 - DNA, 20 bp, Phytoseiulus persimilis
  source 1..20: mol_type = genomic DNA; note = forward primer SNP_10-11 for detecting SNP10-11
tcacttcactgtgctgaggc

SEQ ID NO: 44 - DNA, 20 bp, Phytoseiulus persimilis
  source 1..20: mol_type = genomic DNA; note = reverse primer SNP_10-11 for detecting SNP10-11
cgctagttttgcatcctcgc

SEQ ID NO: 45 - DNA, 20 bp, Phytoseiulus persimilis
  source 1..20: mol_type = genomic DNA; note = forward primer SNP_12-13 for detecting SNP12-13
gcggagagagctggaatctc

SEQ ID NO: 46 - DNA, 20 bp, Phytoseiulus persimilis
  source 1..20: mol_type = genomic DNA; note = reverse primer SNP_12-13 for detecting SNP12-13
tgcagtctcgaagcgaagtt

SEQ ID NO: 47 - DNA, 20 bp, Phytoseiulus persimilis
  source 1..20: mol_type = genomic DNA; note = forward primer SNP_14 for detecting SNP14
agtcccctttactacccgct

SEQ ID NO: 48 - DNA, 20 bp, Phytoseiulus persimilis
  source 1..20: mol_type = genomic DNA; note = reverse primer SNP_14 for detecting SNP14
tgaagtttcgcaggttcgtg

SEQ ID NO: 49 - DNA, 20 bp, Phytoseiulus persimilis
  source 1..20: mol_type = genomic DNA; note = forward primer SNP_15-16 for detecting SNP15-16
aacgaagctagatcggctgg

SEQ ID NO: 50 - DNA, 20 bp, Phytoseiulus persimilis
  source 1..20: mol_type = genomic DNA; note = reverse primer SNP_15-16 for detecting SNP15-16; reverse primer SNP_16 for detecting SNP16
cggctggcattttggctatc

SEQ ID NO: 51 - DNA, 20 bp, Phytoseiulus persimilis
  source 1..20: mol_type = genomic DNA; note = forward primer SNP_16 for detecting SNP16
cgagcattgggtgagagcat

SEQ ID NO: 52 - DNA, 20 bp, Phytoseiulus persimilis
  source 1..20: mol_type = genomic DNA; note = forward primer SNP_17 for detecting SNP17
cgaagtgagcccgatccaaa

SEQ ID NO: 53 - DNA, 20 bp, Phytoseiulus persimilis
  source 1..20: mol_type = genomic DNA; note = reverse primer SNP_17 for detecting SNP17
tcaaactccccctcgtttcg

SEQ ID NO: 54 - DNA, 20 bp, Phytoseiulus persimilis
  source 1..20: mol_type = genomic DNA; note = forward primer SNP_18 for detecting SNP18
ttagtctacggctgctcacg

SEQ ID NO: 55 - DNA, 20 bp, Phytoseiulus persimilis
  source 1..20: mol_type = genomic DNA; note = reverse primer SNP_18 for detecting SNP18
ccatactcttcgctcgccat

SEQ ID NO: 56 - DNA, 20 bp, Phytoseiulus persimilis
  source 1..20: mol_type = genomic DNA; note = forward primer SNP_19 for detecting SNP19
gctcgggagttcgagcatac

SEQ ID NO: 57 - DNA, 20 bp, Phytoseiulus persimilis
  source 1..20: mol_type = genomic DNA; note = reverse primer SNP_19 for detecting SNP19
tgcgtttgagtggaatccga

SEQ ID NO: 58 - DNA, 20 bp, Phytoseiulus persimilis
  source 1..20: mol_type = genomic DNA; note = forward primer SNP_20 for detecting SNP20
tcacggtgcgacttccattc

SEQ ID NO: 59 - DNA, 20 bp, Phytoseiulus persimilis
  source 1..20: mol_type = genomic DNA; note = reverse primer SNP_20 for detecting SNP20
tccaaaaccgtcgctcaaga

SEQ ID NO: 60 - DNA, 20 bp, Phytoseiulus persimilis
  source 1..20: mol_type = genomic DNA; note = forward primer SNP_21 for detecting SNP21
ctcgacaaagtgccgtctga

SEQ ID NO: 61 - DNA, 20 bp, Phytoseiulus persimilis
  source 1..20: mol_type = genomic DNA; note = reverse primer SNP_21 for detecting SNP21
agcaataagggggacacagc

SEQ ID NO: 62 - DNA, 20 bp, Phytoseiulus persimilis
  source 1..20: mol_type = genomic DNA; note = forward primer SNP_22 for detecting SNP22
gctcatgtcgaggctctctc

SEQ ID NO: 63 - DNA, 20 bp, Phytoseiulus persimilis
  source 1..20: mol_type = genomic DNA; note = reverse primer SNP_22 for detecting SNP22
atagggttcggagttcggga

SEQ ID NO: 64 - DNA, 20 bp, Phytoseiulus persimilis
  source 1..20: mol_type = genomic DNA; note = forward primer SNP_23-24 for detecting SNP23-24
gtgtggttgtcacaggggat

SEQ ID NO: 65 - DNA, 20 bp, Phytoseiulus persimilis
  source 1..20: mol_type = genomic DNA; note = reverse primer SNP_23-24 for detecting SNP23-24
ctaggtgagtcgatggcgtc

SEQ ID NO: 66 - DNA, 20 bp, Phytoseiulus persimilis
  source 1..20: mol_type = genomic DNA; note = forward primer SNP_25-26 for detecting SNP25-26
ggcgatacagacaacgctct

SEQ ID NO: 67 - DNA, 20 bp, Phytoseiulus persimilis
  source 1..20: mol_type = genomic DNA; note = reverse primer SNP_25-26 for detecting SNP25-26
gtacccgcgaatcgtaggag

SEQ ID NO: 68 - DNA, 20 bp, Phytoseiulus persimilis
  source 1..20: mol_type = genomic DNA; note = forward primer SNP_27 for detecting SNP27
ctgtcgcacacgaggagata

SEQ ID NO: 69 - DNA, 20 bp, Phytoseiulus persimilis
  source 1..20: mol_type = genomic DNA; note = reverse primer SNP_27 for detecting SNP27
ctcagaggttgctggaaggg

SEQ ID NO: 70 - DNA, 20 bp, Phytoseiulus persimilis
  source 1..20: mol_type = genomic DNA; note = forward primer SNP_28 for detecting SNP28
ggtgctcgctttcgctattg

SEQ ID NO: 71 - DNA, 20 bp, Phytoseiulus persimilis
  source 1..20: mol_type = genomic DNA; note = reverse primer SNP_28 for detecting SNP28
tttcacggggctacattgct

SEQ ID NO: 72 - DNA, 20 bp, Phytoseiulus persimilis
  source 1..20: mol_type = genomic DNA; note = forward primer SNP_29 for detecting SNP29
tcgcctgagagaggtactgg

SEQ ID NO: 73 - DNA, 20 bp, Phytoseiulus persimilis
  source 1..20: mol_type = genomic DNA; note = reverse primer SNP_29 for detecting SNP29
gagggacgcagtggaatcaa

SEQ ID NO: 74 - DNA, 20 bp, Phytoseiulus persimilis
  source 1..20: mol_type = genomic DNA; note = forward primer SNP_30 for detecting SNP30
ctgggattcgctgctctgtt

SEQ ID NO: 75 - DNA, 20 bp, Phytoseiulus persimilis
  source 1..20: mol_type = genomic DNA; note = reverse primer SNP_30 for detecting SNP30
ttctcagaggcgctcgattc

SEQ ID NO: 76 - DNA, 20 bp, Phytoseiulus persimilis
  source 1..20: mol_type = genomic DNA; note = forward primer SNP_31 for detecting SNP31
actcggcgaatcctacgaac

SEQ ID NO: 77 - DNA, 20 bp, Phytoseiulus persimilis
  source 1..20: mol_type = genomic DNA; note = reverse primer SNP_31 for detecting SNP31
acaaggtgccggaatcacat

SEQ ID NO: 78 - DNA, 20 bp, Phytoseiulus persimilis
  source 1..20: mol_type = genomic DNA; note = forward primer SNP_32 for detecting SNP32
tagcataactgaccagccgc

SEQ ID NO: 79 - DNA, 20 bp, Phytoseiulus persimilis
  source 1..20: mol_type = genomic DNA; note = reverse primer SNP_32 for detecting SNP32
tctcggctaatccgcatgac

SEQ ID NO: 80 - DNA, 20 bp, Phytoseiulus persimilis
  source 1..20: mol_type = genomic DNA; note = forward primer SNP_33 for detecting SNP33
gcagccagatataccgcgaa

SEQ ID NO: 81 - DNA, 20 bp, Phytoseiulus persimilis
  source 1..20: mol_type = genomic DNA; note = reverse primer SNP_33 for detecting SNP33
ttgcgagtttttccacagcg

SEQ ID NO: 82 - DNA, 20 bp, Phytoseiulus persimilis
  source 1..20: mol_type = genomic DNA; note = forward primer SNP_34 for detecting SNP34
ggtcacgccgaatttgtgtc

SEQ ID NO: 83 - DNA, 20 bp, Phytoseiulus persimilis
  source 1..20: mol_type = genomic DNA; note = reverse primer SNP_34 for detecting SNP34
gaggcagaccaactggagac

SEQ ID NO: 84 - DNA, 36319 bp, Phytoseiulus persimilis
  source 1..36319: mol_type = genomic DNA
  variation 34739: allele = g; note = SNP_1
gtatgttcagattggtcccggaatcaccttcatgtcttccagaaaaagtgcggacgaactgacaaactgacagactaagccgattatatatagtaaggatgtgttcgatatttcctcgaactttttgaaattgcgatatcggtcaagcgttctcttttccgaaataccctttcgccattccttatccagcttgttattcagcgtctcttccacatatttcttgtagcttctgagacccatccttgcctcgctggctgatagttctttcaatccttggcatttggatcgtttcttgccttggttaatccttttcttcagtgaggtttccgtctttgtcatctgcagcatggtatggatcgcttttggccacctggcttcattcatttcgcttattctggcagagtacatgagtttcgctttcgtttcgcaagccttgaaaggtgaccatcctagttctccgtctatgaattcgacggcggtgttcgcctgcggttgtcccaaggcccaccgacctgcttcgcgtagcaggttttcgagccgtttccgcaatttgacgcgcatagttgtaaccgagtttgcgtacgttagtgctggaaccgctgtgcttttccattggatcttggtgacttcgtatctgttgaatctccacagcgacttggcgtgcattcgtctgattactttctctgctttttcgtcgattggaagcgatgccagcttctcattttgatcaaacgtagattcctattcgagaatcggtccacggaacgtgcccatattcagcacggatccgtgcttctccgtgatcgtctccgactgatagaagccgtgacacaaccttgagctctgtgcagcccgttatcaagaacgagtcgagccggcttgctcaacggagccctattcgagaagtcgctctctgactcaagcccacaatttcacgctcagaatgatcaaaacccggaactttcttggaatctcatgggaagttgactcataaagcgattcgaaggttgtgctgccctgacaatgacgtctcatctgccgaaccttcactgactgatccccgggctcacagatccgctcattaccataaatacaatgaagttcttcaaatacaattccgggctagaatattcgctctcggatagcagagttttgaaacgtagtggatggattcttcagtcctggctacgagaaccgccgcctgtcgttatggtctggtgtcgcaatttcaaccaggctagcaaagctcgcggttgacgccgttttagggggccgttgcggactcattcgacgaggaaacacattcctcggtctccatcattctaacgagacttttttacttgaaaacgttgttctctgtggctttgcagcagtctgctagtacttcgacattcaagtaacgaaattcgaggctcacaatcgtcctccaacttcgttcgtgaggaaccggaaacgctccggtttttttcagagggtcacaaattcacgggaaaagccatctgaatgatggcttttcagcataaacccgcgcagttcgagattgagtccgagaccaatacgtgcactcccttggagggctcggaaatgagcaaaaatggccgttgagctagcctaggatccgcggatctctgcagaacgtatccgcaaagtttcacagtcgactcaaactgttcccagctcattgccaccaagtagactcgcagcacgctgtcctcgaggcgtgattcagtgcatcttcttttcataacttgatatgggggagcagtgagagaagaaaaaccaagtacatactttaggagctctcgcattcatgtggcaactcgcaaaatgaacgcattgttcaatttactgtaaaataacaagcatacaatgagctatgtacctcacaaagcgagttagggaactcttgagagggctgtatcctatcattacgaatttctcatctacaaattcttgctcggatcatcggtggatttcgatggcttccttcttgccgatccaaaggctcttcggagcatagatatcgttcaaactttctggtttgaggctcacgcggttttcgccgaggatcatccgcaagatgctgaagtcctgttcgggctgaacggaggtcatattctgaccttagcacaatatgccgggtgcgatactgatgggatgtcatttaggaagagccctctcccgcgaaagccagcttacagtcagctgttgaagcattgacagctgcctcttggctactgttgcgcgatacaaacaaacaaacaaacaaacaaacaaaacagaatcgggctcgaaaattcccgactcaaaaataccctgtacggctgacaccagcgggctacggaaccacgggcgatagccacaacaaaagacaggtagtccgtgtttgccctacgaccatttcctcatggaatttcacgaatatatgtgcgctggtcttgcggattcggatccgctggaaggcctactggtgcccccgaagttgagcgagtttcgagatgcttaggagaagttggaaacaatcagcatctcggacgatatgctgcaaactcctcccaagttcctagtttctaggacgtgattccctatcggacataattgaagcggagtgatgagcagcgtnnnnnnnnnnnnnnnnnnnnnnnnnnnnnnnnnnnnnnnnnnnnnnnnnnnnagcgagagtagtgttcaggcggagcgaagagctgacaacttatccagaccacgatacaaacccagaacggacagggagtcagagatgggaatacagtaggccgtggagcctatgcggatcgtgttgcttgacggaacacagttcaatatctttcaaacattggaacaatactctgggatggaagtagagatacatactgtacattgatcagatgttccaactcgacggacgacacaatcaaggaacattctgcgtcgctggcatggatgtcaactccagaatgggaagtcgattttcgagcatcaatagcgatgtttgatgataagccgttcgaaccggggtctccaacatagacattcagtacgggggacatatcgcagccatctcattcttccacggaacgctgagtggtccagcgcggcggtgatatccgctcgggttcgaattaagggccgtagagtcattcagtgctaatgaaagtgctcgctctgttccgtctggtttgtggaccaagatggcgcccgatgactctcgtgatatggccagcactggcggcatttgcttttgtgtttctcttctgtccaactcttctcgtcggaacttcggcggcgtcatccacatatcagtgaacatactggccatatacgttggtggactgtcaaggagatgggtctcacttaaccagaatgggctcgaaaggtatttcagcggaacgtgtcgccaggtaacggctgccgagctcttactgggcgtcgggttcatctttttcttcctggcgctgatggctctttagatgcagcactcgctgtcgagatccgcttactttcggatgctcctcagcccgatcatgttctccatgaccactttcccgttctttgggatccacttcattctgactcgctggtattcgctgacctggccgtgtgcctgcgnnnnnnnnnnnnnnnnnnnnnnnnnnnnnnnnnnnnnnngttctccacatttttttttcgtcaatctgggatctacagccacgttctcggagtgtaacgttcaggtcaattcgatttcataggggttcgccatgggtgtaccacacgttgttctggtgtgcatgggagaacgtgtcaaggcgatcatgtacgaaaagagaaccttggcccgtagagtgttggcagagggaaccagtcccgtccatgagatcttcaccacgatgagccatcggaacgccctgggaatccgatggatcgccaattcgacatacatccggctgttccgcgcccgccatcctgatagtcatcgtcggaccgaagacgacaaacggggccacgtcgagaagaagggggtgttctagccgaggagggaactaaaatctcgctattcgaggcggtttcggaaagatgaagtcaccgtgctttttaccgacacggcctcaagagcgagtatggctctagttccgctcatcgttcaaacaaaggccgtgcataatggcnnnnnnnnnnnnnnnnnnnnnnnnnnnnnnnnnnnnnnnnnnnnnnnnnnnnnnnnnnnnnnnnnnnnnnnnnnnnnnnnnngtccttcgtcggaaacgccgttttccgtcgactctctcacagagagcttccgccttctgaagtcgaactcgggattgagcgagaatccagtgttcctcctgtatttgcagcacatcttgcatggcttcctcgtcgaccgaggcatcaagctaccggtacagctattcctggaggatcatcattcccacctgaccatggaggtcacttcatattgtgagaagcagagcataatcttgatgccactgctgtcgaatgcgaacgttcatacgtgttgtgtacgacctctttcaatataagccttttcaccacgttcccatctcctgtttcggtgacacaggagcgttgactctgacaaactcggaattattcctctccttcggctctcgttcatgggcagaccgaggctgacgtaaatatcagcttaggacgaagtcatggccggaagttttcgggattcatgatcacgatggcggccttggttctccgcgatctatccgtcctgatacgaaaattgttgaagtgatgatgttaagaaacccgattgcgaccagatggattacgtctttcgagccttcagagttcctgacctagaatggacccgcaaagtccacttcggccataacgaatgtagccgtcggatcagtctggaatgtaaaggagggactccttccgacaatggtttcgctctgaatctcgcgcagactgcgcaggaacccagaactttgttaaacgagctcctcgcttccgagacgaggtactcagacgctcatgatgaagacttttagatacatgctgtgagtacgtcttcagttcacagatgaggaacaggataaggggggcgcatgagatcaactgagagcaagaggtgtcgctgaaaccaagtctgcagttctaccagctagacagaacgtgcatccacatgaaatccttcccccacggagaccggagaggcgacgctctcctggccctcacaggagccgaccgagacctcgccatgggaggcagaacccactcaattacgatgagaatcaagacaaacgcatttgacatgcctcacatatgtagaagtcgtggaggttgtgattcatgagtgcagcggcgcctgccacaaggacgaggactccaccctcagactgagcctccgggaggagatgagacccctcgatcttgttacggaagaaacgaaatatggagccatggtgatagatgtgatgatcgacatgaacaccccaaacaatatttggttcataccgatattgtgcacgtcaacccgagtgtctgtgaaacaaacaaaactggctcatgggaatgacctctgcatgtaacagacatgaactgaatcagggacgaactttttttttctcagattttccgccacgcttcatccgccggccgtgtcagtcaggatcaggcatatattcccgatattcggaactctgggaacaattcccgactcggaaatcaatattcgactcggagatcaatattcgactcggagaacggagatccaccacaaacggatgcttcccaccgacaggaatgattcaaaaaacggtggagctttgtttcccgagtcggaaattatcatctgagtttcgagtctcggaaataaatgcccactcaggatgcaattcgacgaagagccagacaagccccatctgttctgcaggctaaatcgaggacctgtttcacggttaatcatcattctgattgaccgtaggaccagctctgatctggagcaaatcatacatccaaaacgctcaggactccgtttcctccaataatatctcttctccttcaatattcaagtcttctggaccaaatccggctcatctgctgacctagtcagtgggattttcgtttcgagatgagttcccggcacttgaaccctgaaaaggcgagcatgcgtacgggaagaggggagattctactcaagctgaccgatagcatatcgagtttttcaaacagcatcggcttgaatgagtccaaaccgacagcaacaccgctggggttggcctcagacttaggaagtgagctgnnnnnnnnnnnnnnnnnnnnnnnnnnnnnnnnnnnnnnnnnnnnnnnnnnnnnnnnnnnnnnnnnncagctgtttctattcgaatccgtcgattccgagctgcagtacagtgaacaattggccaactgagagacacaatgggtctcagactaaaatttcacagaaacaacaccgaagtcctcgaagttctcgccgacgccgattggagaggttgccttgactgccgaaagtcaaagacgggatacagtgtcattccagcgggtgcctgtctatcctctgcagcgggaaaaaccagtgcaggatagctcggtgaaaagctgtgccgtcaccggattgagtagtgcaaacatctacgacctttgtgagaaatacgtgtttgagctgggcgcgtcagttttccttccttgaaatgaatctttctcgtatgacacttttaccttcggcgcatcgacaaagcccacatgctcttcccgtgttcgaggctatgtagttcgtcctgaatggagagacatcctccctctagatccgaaccaacgcccagtaagtggcgaaacgaagtaccagcaaaaatagtttcggaggggatctactaatccttacctcttggtgacatgagtgtccagttcctccaaaactggatcgtggagattgtcatgagctgacgtcgtgcctgacagcttggaactctcttgctcacaacagtcggctcgactcatgacgcgacttcttgggtggtgccaaaacaatttgaccatcgatcgacgactgattccctttttccgtgatttgtcgctttcgaatggtccataaaacgctccgactcgaagtggacagacggagcatcatgaggtccatcttgttagtggtactgctcgtcctgctcggactcctgtcatcagccgcagcaggaggaggaggcgggaagaaaaagggcggaaaaggaggaggcggcggtggaggaggtggcgatggtggcaacccattcaacggcggcgatgataagaagaagaaaggcgggaaaggatggtgaagtgctacgatgttgctaataaaacaaatgccctcgaacttgtttgcaccaatgaacgacatcaacttccttctccaataactccatctgctccttcgagggaacctcccagttcaggattaatagttcatggttcagaatcgcgtcggacagtaggcgccaaatcgaaatatctccctattgcgcgaaatgactgtgggctgtacatgagaccatcggtgggatatacatatatgttcacgccctcccgtgaacatgaatcgccaaacatggacgatcgactcttctgaaatccgacgctagaaacatcgactcccaacctaatctcaccgacattcttcgggagtttgtagtgtgtaggtgtgctgcgctgaagttgcactgagctcgcggctcgttctccgctacatgaggaggttaggagaaagttgtgtcgtttgttctctgatgcgctttccaccgagcacgagaacctctcaacgccgaaccaacgcaaagtaagtgattagagtcggaagagatgcccctcgaatggtctcgattgaaagattagcatctgcacgtcggcgtgctctaaaatgggtgcgactctcagtggaaccacagacgaggggaactattagctcccaatccaattagtgaacctttcaacttactggcgtatatgttttcccaacccgttcacgaacaccggaaatgagaactcaagttttgcagacactcttcgagctccgaaggccgtgaatcgtaagagaagtcgttatcccaggagggagagcgctcgttcaaccccaaaccaggttccgaatgcatatacgacaggctttcactcccatctgattcccatttgattcatcccttgtgcctttgccgccgcaaagcgagaacatccgccacggcatggggccctcgcgaaaaacctgtccaaacattttatgcctcaaatctaatcgacgacgctgtgggtggtaccgtgacgaccacaccgtcttccagcgacgacgtgaaagcaagcttccgtgacagttcgctctccccgtactctattaaaacacctctgcgaggcgtcgtctgacggagcatcatgagatccatcagattgctcccactgctcttcctggtcgcacttctgtctctggtaacggcgggagggggacctcccgcgggaggtggcgggaagaagaaaggtagaggcggaggtaaaggaggaggcaaaggtggaggacatggaggaggtggcggaggcggaccaggaggagggggcggaccccctaacggtcctcccaaaggaccttgaaatgctgcagaatctacaataaaatagtacgccctcggactcatgtgcacatggaaatagccgaaacattttctttgacgtgactcgcgaaaaaacgagctcatgaacctgcagatagcggatcctcgaggattcgggtggatttcccattggatcaggccattttcacatacgtaggttgctcttggagctgagaagttccgttctcgtaatccatccaatcttaatcaaagaatatgttttagtatggggcatagtgaccacacacattccaagaattacaagcaggacgggcctggtttcgtttttcggaatatccatcacacggagcgcttatccgaaagcagtaatgagcgaacgtgtcgcactgttacgcagtgcgccaaaattcgttcaagttggagttgcgttttcgatgtcaacatcaagcgggcaacactctcgcagcgaggctccaacttcaacactggcgcaacaggagtacaaccgttgcattcttcgctccaaaaaagagtgggagttgggatatcatacgagtacttcttgggaagctcatttcttcgccttccaacaaaaattcactggtttgctcgatcgctaggaaatcactctcaatcgagttaatttacactttacagaaactcttgaagctctcgcagttgagtctacaacgtggaaacacttgtcccatgttccccgatcattcgggagtccacggaagaggaaccagccatatggaagaggtttcacctttgaatatgtaacgtgaggcaacggttgagttagagtcggccaatcttgactcgaaagcgattctgagagggcggggatgctacagactaggaccagacaacacactcgcgatccatccaacatcgacacggaatgcgcccgatgcggggccccgaaaccgaccaacaggtggaaaatgctcccagcagaaattcatcgtacgaccaggacttcacccaaacaccataccgaaggccctgaggaggacgaaggatatcctaagacgatggcaaatcgaaaaccaaaaatgatctgtgaatacaaaacaatccccccctgaaatgaaagggaacatatgtgtatatatgtaagatcggaatgaatccaatccaatccaatagagcgattgatttcgatcttgtactagatgtagggtctgtgctcgaggctgtggactccctcacggaaggagagccatttgggaaaactcggaggttgataagagaagaatagcgcccgaccgcagattgaaatcagtggattgctctttggaacattctgactaataggcttccacccgcataaccacggtaagaggctcgcaacttggagaatagttcgctcaagcaatcaaatacgaatgccgcaagaaatacaccttacacgaacgcaaccggtctggaaaccttgacacatttgttgtagtcaaggtaatctctgctggtgttatagctgacgaaccttgaccagcgaacttgacgtctgttcatcctactgagcagcctctttcgaagcaccccgatgtctttgttcaacggagatcgcggcaactttcgtagtgaaatcaattcatgctcgcggcatctgacgaagaattcactcctgtgggtcaacgatgataggagagaagtgaattccttcattgtggatttccttgacgtcattctcacgggacggtgatcgtcgaggcagaaatacagagcataatgctggcctcgttttgcgtaagcttcttcggttaatcttctcgcaaccagatcggtcgaagatagttcctgtagggggaagccgatgctggtctggagttcactgtccagcccacagagagctttcttctcgacgagcaggaagaaccgctgatagtccttgatccggcaccgctcagccagcgaacagtgatgatacagctcagcttgaacgggttccatcggattgaggaatcgggacatgacgttgttgcgatagaaggagctcatggagaagttcatagcgacaacggtggaggcgacgataaaaataaagaccttcttcaatttgaactctagaggcctgaacgagaagaagttggcgatgaggagaacagcgttgcctgagaacgagctgcgctccacagtagagacgagccgcccgacggagacgcccctcgccaagaaaacagcccagaccgtgtaggtgaaaacttcgacgaaagtccagagatttttctctcgtattttcatcgcggagtaacactgagagagatccagcatcgcgaaaacgttgttgagaatgaagtgagagaactccggtaccgccgatctcttcaatgtcattgacagcggctctatgatcccttcactgcggatgagcgtcgtgcgccaagaatttagttggaactcgaatgtgcgtaccggactggctggagaggtagccgaaggtatcggtcgtcatttgtatcaaactcgcttctgtggtgaaactgtcgaaaaccgaatcgtcttctatgtgaaccacgaggatttctctcatggcaattctggacaaaagaactagataatccacttcctggaatacctcactcatgcgaaagagagaacctgccgcgaagaggttccacagaagagaagccacggagaccggttccatcgttaagcggcatcagaggctccgctcgtttgcgggatctcgctcgcggcgagttcgcagtccggtgtgtgcggttagagagggaaggaaaatcttgcccaccgatcagagcagattcatgtggtttttggaaagcggtcgttgcagcgagctctcttgaaactccttccgagcgcaatcgtaggcgagtggactcaagattcgactcctaaggtgacgggataccccacccgtttcccatcagctcaccacatcaggggatcaatgacaggctgaggagagatcaatcgaggacctagatcatatctgtcgttcatttctgtggcgctcggtaggtacgccaaacttcggaaacgttctctcaatccgaatttctcgaagtcgaattttcagtcggaaattcctctcaccgatttccgacaacgttattttgcgctattcttggaaacgctccactctacttccgttccatttttcgcgttcccgagacgagtgcgaaataacgttgtcggaaatcggtaagaggaatttccgacaacccagggtcctgatgtgagaacgccgggaaccgggaaggaagcgagaacttcgtcggagagacgcagatttccatttgagttccgagggagtcgaaatacccagggctgcgggagagacctctgagtttcggtcgccaactcccagaagcgtatcgcgccgggattttgtcgttccaaatcaaactgctcacaagagctgatgctgggttcgagcttttcagaggcggtacacgagtacatgtcgggcgcctcctttctgctcatacgagtcctgattcttccaaagaggaatggcatcgtggatttcactgcgcattcatttcagatgtttgtagcgggtggtagattttcttctttgctgcggtcgcgcttcgaacctgcgaagcacaaccgctcccacgaatgcccgcgttatttcacgaggagagtaccgtatggcatgatgggcaaagtaaaaatggtgattcctaatcagcggtttcagcctcggtgagtaggtctcagaccgaatccagcgcgacatggcaactttgaaggtcatcaaatcgtattcgccccttccgtgctccgctacggactacggacttgtcggggtctcctgaagacagaaagccacctgtcggtactggagaaacatccatcctctctatcactggaataacatcgtccgtgatgttcctcacggaaccccctgaactctgatcatgtttttcccccgatctgagcgtatttcgaagaagattccttctcgatctgatctcatgttccggggtgattttgaggttgatttggccatacttttcgaggcccacggaggatctacccatactcacctccaggagtatggtcagatcgatcccggaatcacctccattgacctccataaatgtggtcagatcaacctcggaatcacctcgaaaaatgatgtcagatcgaggcggaaaaannnnnnnnnnntcatcgatctcgagtttgagttcggatctgaacccggatccggaacagacccagactcggatggtccaatccgaatcgagcccatcttggggttttgaggagagaaggaggtcgaggcggcaaaacaccgctgctctcagagctgttcttatcgaacatgtgcgcttgtgaagctctcggaaaagctcctcgaccagcagtttctagaaaactccggctgacgtnnnnnnnnnnnnnnnnnnnnnnnnnngaactcattagctaaaagggaaatctcgatcggacggcatcgccgttgaagtactgcttggatacatcctaatgaataccctccgtgctacgtcatccggcttcgaacttgaggcatctggaatctgtcggggtcttccaaggagcgagaagatagctgtcggcactggagaaagatgtatactctccataggcggaaaaacaagaaacgaccgacgtatctcctcgcagcttttggctatccagcctctcgattcgagctccccagcttggccacgaatttcctcctcaacactcaataaacattttcaaaccgctttnnnnnnnnnnnnnnnnnnnnnnnnnnnnnnnnnnnnnnnnnnnnnnnnnnnnnnnntaacaacaagcccatcttcagcgaggtcttcggccatagaggactcggcccattgatgctggtactcttttaatcgttttgaaaccaaactgctcgatatccatcatcgnnnnnnnnnnnnnnnnnnnnnnnnnnnnnnnnnnnnnnnnnnnnnnnnnnnnnnnnnnnnnnnnnnnnnnnnnnnnnnnnnnnnnnnnnnnnnnnnnnnnnnnnnnnnnnnnnnnnnnnnnnnnnnnnnnnnnnnnnnnnnaattccgtttgactttcaagcaaagctgcgggctttgacgtttcctacgtctaaataggcatacaccggactgtcacgctggggacagtagcccagctcgcgggttcgaaaaatgaatggaggagtcggaatcgggtaaagtgctggtgcatagctcatttcacagaatcgaaagggaccgcaaaacgccgcgtgttccactccgcgccgtccctgattcccgttaattggggcccgagtttccactcgaatcttggtatttagacctggtgctatcgagctggcgttattcaatcatgggtggcgcacggcgtaccttcaaaatttcatactcagatcactcaacgagtcgaaatgaagaataagtgacgtcgcaggccctccggcccccttcccgtggcatgaaggtcatcatcagcctgaggaggccataaatatgcttggaattatattctccctctagtagaagctcagtcaagaccagaatgtcgagtggccgtggaatcttcaaggtaatgtctcgctcaggttgtccagtcactcccaaccctgctccactggtggcttttagtttcgttttagggtcaccgttgttgcgcgctcggttggtgctgctgatactcggagcgcggatctcgtaaagattgatcaatcgactggaggttccatgagacacactctgcttatggcctcacgttccctgccgccggatttccatgagaatgtgagcgtccctgtcgttcgctagctcagtgtcgtgtgggccctcttctcacagcgcctcgttttccgcgggacgaaaatctctccgtctattcgccgaaatgctcgtcgttcggttggcgaccggccggctgactggctgtgccaatgagccgcgacgtcggctgtcagctttggcacagtctggaaggaatccaacagcagtacgataggccggagacagccggtgacgctcagtggagctcgctcagaccttccacgaggcttatattcgcctggaactgtcgggagctgaagtttttcgagtttcgcaagaatttcacgtcgtgcgctcattgggctcagcggtagctctggtctgaacgactgtccgacggagaagctgtaggagagtggcataaagtttgcccggcttaagcaatactacataagcagactctgaaattaccattgttggaactggtcgaactcggtatgcagatgagacacggagagcgctgggaagcgaacattcgcgtcgcggctcttacagcttccacttcggttccgttgcaaaaccgagatattcagggcggactggccgacccgggtccgagtgcccgacttcggggaacgtccgaaaacgtcgcggaaaccaaaacggagatcaggcgcggcccgaatctcacccagctgaaagctcctgaaaatattatagaaggccggaaagaggttcaacgtacgcttgaaccaacgggtgcgacctcgtgaatcatgttctgtgaaaagccagcctagtttcgataccgagtttgtctttgcagtgcagatttgtgtgtgtgaagttttttgaggaccccgcttgcccgacagcaccggagagggagaaacgtagatagaacaagatttatgaccttatcgacagcttttctatgcctcgcacagagtcataagtcactaccgctcacttcttgtcgtccgggcagtcagggagggcaaagaagggcatttgaatcaaaggagagaccgggacgatgccaggactgggtgggaaaaagggcacgaaccagcagaccagacgagacaaaaaaccggacaacattgtgtccgcctttgtcgcagtcgacatcattgcctccgtattatctgtgttctcgccggagttcctgtacttcatgttccccaatagcgtgcgaccgagcttcggaaaagcataccttccgccagaaggttttgatcccagcatcggaggcagccacagagggcggtttattcccgcctgcgtgggtcttggcgggctctgccctggagcacagcgaagtgctctgttgagaagtttgaaattctccacccgatgcctgggaaaacaaacgttgtgaggaactcggtgaaacggtccgcggggttgagcaaactatagaaccggaggaatccaggatattccgacacgaacagatgctctcagcgacgaacctnnnnnnnnnnnnnnnnnnnnnnnnnnnncccgcacgcttggaaacttccacgctttccactacaattttctctgttcaaaggcagggaccagagaaattcgacagtgtccgaactcaggagaccgagctagaaatagtctcccgcgatgcgattcgaacagcgcacgatcggaacgatatccgagatcccaaatagctaccgagcgagccgaaatacgagtattcgacgctggccgggggacggcgagctcggcaaccgtgtccctnnnnnnnnnnnnnnnnnnnnnnnnnnnnnnnnnnnnnnnnnnnnnnnnnnnnnnnnnnnnnnnnnnnnnnnnnnnnnnnnnnnnnnnnnnnnnnnnnnnnnnnnnnnnnnnnnnnnnnnnnnnnnnnnnnnnnnnnnnnnnnnnnnnnnnnnnnnnnnnnnnnnnnnnnnnnnnnnnnnnnnnnnnnnnnnnnnnnnnnnnnnnnnnnnnnnnnnnnnnnnnnnnnnnnnnnnnnnnnnnnnnnnnnnnnnnnnnnnnnnnnnnnnnnnnnnnnnnnnnnnnnnnnnnnnnnnnnnnnnnnnnnnnnnnnntcattactcagcttcacgctcgggagatctacgattccggggtaggagctctttgcagctcgcattcgtctctcttgcacacaatggtccgagtctcggggtggtggtggtggtgggcgtactcatcattacctaattataactggccggtcatttgaaatgcaccccttgttgcagcagacgtccgtctttcactgatcgagcttggtccggcacgcttcgtatttatgaccccccgagatgtgcggaatctttttacggcgagttttcctttgaagaagttcttccttcggccgccccactttggccatccgcctcagagcgccgacgatcatcacggcggagacgatgagggcctaccatctaatagcaagttaatgaaggcctcaccgagcatggcaagagggagatccaacaccatcatcatagagcaccgttagacgttgcttcttctgccggcgccgccatcttcctgtcaaatatttacctagtggcagcaaatacctctcgaatgactgaccattcgctacagaaatagccgcggcactcgaaagccatctcaaagcgaatgggccggacaaactttgggatgcaaccgatcatctcattacttctgtttgtccccctgaatgtgttgaatagtttcaaaaggcacccgctgactttggcagctctggccgcagccctcggacccacccgcattccgaagaggaaatccgctctgctattcggccgcctgggcactccaagggatcggcgcggaccgggactcggttcggcttgcttggagttgagttgaacaattttcacggaaaaagtctcattgtcgtacccccagctctcctccaattcttcagtagacacggaaccaccacgattgaatcaactcattcgccttaaaacagttcgaagtgatcgaggaggaaatcgcaagagttgatgcaatcaggctttcagtgtagctggaagtatggtacactgtatgaaaatataagctcaactcgtcgacggcatctcagatgtcaaccctcttcctcgctccacttggccactccgagtaattatcatttccgacgtgcgtttctgccgctgctctcagcgtccctcaagtttctgcgtgggagcggcagcagtttcccgcctaaatgaacgactttcatatttcacgagttgctttcgtcttccctccgcaaggcgcggaaatcgtgctccggctcattcactccagccgcgagtgttgccttcaacacaagaactccagcgagcggttgccacttcattcccagaagcttttccataggatcggagagttctacatgtagaatctgctgggatcatctgtcggtggaatacatacagccgctggcgggagctgtgtgggtgaggacgcggagccctcgacgtggggatgggaggggagcagtgagatgagctggagcgaaacggcaggaggaagagcagcagcagaaggaggaatcctgatcggccacttatgcagaagtcgctattttgcttagcagctgagtcgacggcggcggaagcagcaaaggaggaagatgatttcagagcgagagcttcattctgaacacatgcttccacctcatcagcggcagtggaagtgaacgacgtgctctggaagaaaaaactccacgagcatcttgacctggcgcccttcagtacaagaatccacacccgggcaaggccgtggaaatgaaagaaaactcgaacgaaacatagggaacgaactgcccccatggttctagcgccgttccctattccacgtggaaagaggacgagagtcaattcaagcaaatcatggaagccgtttggcgacgatgagcacttgatgaggatcgcgaggtggcccccttgccataacctcggactcctgcaaacatcagtagttttggcggtctctctgtgatgactcgtgacattatcgaattgtcggtatgattgatgtcgagctcggtcgagtggcgaatacattgccagcgcaggggagggggggggggcatggatgtcatattgcgaatcgttcagagatggggtgattggcacggcttgcgtcatccgagcttgaatgcttggtgaccggtggctgtagggttggcgagacgtccagattgttgtgtaagattggcgacgtccttgatctcgagcaacaaacttccacatccgtcattgtcaacggcatgacatccctcagcgccccggttccccactcgcttcctccaatccgcccatgcgccttcgagtcgccgtctgcagtcttccctcgacggccatccggcggtcgaaagggaacccctggaggtggttgtcctgttgttggagtcctctccggcggagactcggtcgccgggtacgatcatttcgcgtgatggctatccagtgcaacggcgccttcaaggctcatgggcctccgctgagcgctttcgctctgtctctccaccgacattagccttctcgaccaaaagcggtggaagtggtgtaagagcgagctgctgcccgctgacttcgctcaccttcctcaagcgtttcaatccacgcgttcctctccaccacaccgctctttcactgctgcccgtcacgttaagtcacctgtgagttattcacttggcaagtggagtacgccgctgtacgctgggtagagtggccaaaaaccgaggagcaagtagagtgggcaaggcaacgacgagtgacaaagggggagcgagggctcggatagaacgtcccgagcctctccgccacgnnnnnnnnnnnnnnnnnnnnnnnnnnnnnnnnnnnnnnnnnnnnnnnnnctttcctgatacgatcgagtctcggaccgcagcgtcccctccaagaacatccagaactctctcaacatctcgagagtactgtttctgtggaagttcattatgagtatgagctggcgttcctgtctgctagttgcccttccgttccggaagagttggcgccttcacaagggggcagggggtcggagccgctgctaaccgggagcgggcttctggaagggctgcgcgtgccccgcgtcgtaagttttaatgacaaaaactcgattggccctctggtttcccggacacataattgcaattagacatcagtctggtaaagggggggggggggaagagcaggacggccaagacggnnnnnnnnnnnnnnnnnnnnnnnnnnnnnnnnnnnnnnnnnnnnnnnnnnnnnnnnnnggtggatcgtgcgttaactagccaaaggctgattatcctatcggatacctgcaccataagtacggagagccggtcggtccagtcggagcagcgcagcaattacccaaactgcgagacgttgcaatgatgacattccgcgatccggatgcttcgcaaagccgtaaaaccctcccagtataaattcgacgtcgtggccgttcagagacagacgtccgttggtcgccagccagacgactaccaaacagtcggatgccacctccggtgacgtttatggtcttctgggaaacatattttataccgtggtaagccagtccgtttacggcttcactgcgaatgtcggactacaataaaaaaaaaagtttgcacgcccagctgcagtcgatgaagttatcgcaaagcgcagctcctacgcagacgacgtccgcgtgctccgtaagtccgctcccactctatttgaccactacacagttttgtggctgagctctcctttacgaaactcatttcggactctcgatcagaaactcgagaggaactcccaaaccactctccgttcgagttctcgatcgcgtggggacggcgtgttccacgggaaaaatttcggtgctacgtttcgcatttctccgaatgacgacggggatctcgtgctacagatccaaacgacctcgggatagtctctacaatttccatgaaatcgaagtttttacctggtgaggaactcgcgagaatgtatccagcgcggcgctcgctctctgctgagtgtttcatgcagaagactcgacgagtatgaaagaattccgggtcccgagggaggccatcgagccgcgaaattgaaatagtgggcagctaaggtggttgcccggctaactgtccgccagctggaccggtctggtaacgactcctatcgtagaagggagttttgtgtctggggtccccgcccagactcgtatttgatgaggccaatcaactgcgtcccccatcggtgtccgtatgtctcggaggagttcgaattaagccaaattggtctcaaatcagaacctgatcttcttcccgctcccacccaagccggctaactagtcgcggcttcgtcttgaattccaatgtcaggttcacacgttgctgccgagcaacggccaaagtacgaatttccgccctgataccttttgttcagcaatatcatacgagtcgctcgttcatatcatatgagggaatgatatgcgtgacgcgaatttccgacgaggactgacataccatattgtgccggcagggctcctggtactgatttcaccagtttcatcatcaacagagggatgcggaggaactcgtcgaagagaaccatcgaaaatcaccgagattaccacaatattctttttccgctatttggattcgttccgatattgacatgcacatatattatttctcaatacagggtttttttttcctccaacgtttcgttttctttttcccaagactacttggagtatttctcgagtcaactctggaatttttcaaagtcattcgttgaggttcgtctttttccgcgaatctccacggagcgagccaaagttcgagcagaacactgagtcaccagcgactgccctcgaaacggatcgagccgctcagccaacgaaaagcagcacaaactgctaacacgagcggtcaaggaatgtgtctttcgagagcttgcccaaccttcatcctgcagccgtactcaaaattcaagcgttcgcactcgaacacttcttctgtttgcatattaaacccattaagaagtctcgggtggggtgtcgaccggttaccccagagttcagaccagtgagccggtgagtgtgtggagtataagacgagatctgcgggagcggatgaacggacgagggagcggaggaatgagcgagcgagcttgagtgaagagaggataggaatgagggcggagggctgccattaagaactttaaataacttcaagtcgttcacgcttaaggtcgatactcgcaacttggaggaggctctggctggtcgagcgtcgaacgggccggcccgctagccgagtgtttttgtttgagcgtggctcttattgcattttccaagtgaacgcctcgtctcgacaataaaggagcaacttggagccaggaagcaacgatattacttcggaagctggggtcgtcgctcttctcaccccacctgcctcatatttccactattgaaaaaccattccaccttcgtcggcttctccggctcgaattcgtatcgagtgaagccctttcaggcgtattggagggactattagctctattgatctcaccattttcgattgcgcacctttggcagttggaaagggaaagcagcactctgctgactttgggcccgttgggagcgaggttgtgttgtttcaactctccaacaacaagagtgaagttgagataaataataaagcatccagctggttcgatgaactgtagttcgcatggggaggtagagtcgacttcaaatcatacttctcgcgaaaattcgggtggcgaaaactgggtatctgccacatataaatgacagccactctcgctcgctaacgctttggccctctcgtttgcgatgtttctcgcctgtcccctcggaaactcgattcgctgctcattcgaggtgttctgagctccgagatgacctacgagtagggataagattttgcctgctatgtccttgccgtccggtttgtccggctgcagtggaagtccggagaatcttgcctctcgccgcttagcgtcgattcgtcatttcctcgaagcgcaagcagtgtgtgttggcagcgaagctgtggcagagtcccgacgcatggcagccccattcgatgtgactctgcaaacggcgcacccctctcaggaatagtcgattttgacgctccgtcaatttcaggggactcgggcatgttccaactattcgcgatggaccagcgctgtggaaacattccgacggcaagcgatcagcgagttttccacaagggactccatctcgtttgtccagacaactttcatcaggtgaattcactcgttgcgtttgttaggttaggttagacgagagtgaatccatatcagagttcatggagggcgccgctcgcggccccaccaataaccgctgtcacctgatgcggaacattcctgaaaacggcacgtcataattagacgaatctgtaacgtccgaaggaaatcgttgtcatcattgcagggaaataactcatcgaacctggcccggaacatactagaagtgatcatggaaactcgaggaaatacccaccgccaaaattaaattcgaatctcggaagccctcctgccaggcttgagagaatcctacagaacgacccagatttccaccgtttcctctcgctgactctgagcctttcagctacgcgatcgttcattttcagcattaatttttcctctcctgcgcgattgagtgatggttgataaaggtcatatattctgtcattagtccaacgatgagagagttctcccgtatatgcccctcgaagttgcgaacgacctgttggtgtgtccggtttcaggcccgctctcctgttcaatctgcgtcttgttttgaccgacaaaatgtcccgtgaaatctgatctctacttatgagctctcgatcatacatctcatcgaggaatcgttgtaagggctcaaagagggacattaggccacgcgagctccccaaagtcttccagggacccagtctcccgccccctgaatccgagccctggggtcaatggcggcgctagtctgctttgggacgctgaaattcgatttatccgtcgaccgattctccgccacattatggtttttcggaaccgctcggaacggaagtttcctatgatgaaggaaactctcaagcaatcagagtcactgtcaatccaccacgaaattcggagacagagagtggaaccatctggtctgtcagcaactctcgcgctgaggccgcgtggtcctattgggaggagaggagttatttcttatgagatcctcgaggggcggcgcgttggccttccgcaggtgccctttgtttcggcggcgctggctggtaggaaaatggatccttcgtcgctggcgacctgagattgctcaagtgcattccgagaacctcgtagctttcctgacttctgcatcatccgagaaccctccaaattaagagctggcggctgtaaagcaatctgctgcttccatgggaatcgctccagatccgtgagtgattctcatcacctctcagctatggacattccgctgcaacaatgaaccataataaacgattgcagttggcatcgcttggttctcgtagagagtctttatgactcgagccactcatcgggttcgttgttgtcgggccggccgaatgacctgacagagaaactggctggctggctgacttacgggttggtgagcgggaaggcaattgaaagccatcgctgacgagagagtgctcttacacggagcaaagagggggaaataccgtttgacctgtgaggtgcgcgggcagacgcacgagggagccgtcgggcggcagttctacgagtcttcgagttgagtcgaattgcgaatagaaagcaacgataaaagcgcctcgtttggggaacaacttgtagtgcttgggacaatgaggttacgacctcaaataccgctctggcctcgtgtgggctgtaaagaggtgctttatgagcaagcaatgacgcaggagaacacgcacggccatgttgcaacctgtccggcaatcattccattcagttgaaacttccacgaacaaccgtttatcggcgcagcgagatcacgacattgtcggcggcttggaaagctttccagatcggaagttgaagccgacaacattcgaaacgtcccgcccaccggaatcgctggagctccgtaaatcagacacaaacgcgtcctttgacctgggccagaattccatcctgcgcccgaatcgcctgcgtgcagcgaagagaccgactgtggccattatgcattcgtgtcgcgattctcgtcatctcttgcgttctccagctagaatacgtcggcgcctcgaccatgacgacgatgtcctagatgagcaaatgataaattgcgactccggaacccccgtctccggcaacatccccaggcgtaccgagaaactttccggaaagcattcgagtcttgaccacaagccaaggccgctttgaggtcaacttttgtacgccgcgctaatttcaatttacattcaaacttttcatcatcgcacatcaatccgtcttcctttgagtgctgtggcttcgcggtggcaaccgacgaccaaccgacggagcgtgcagccgccggccaaggacgggctcgggtctttcgggcgcggggccaaatggaagagagggatggatttcggccccgaaattctgaggcaaaacgtctaatggaagaagctgcagtgcaccatccgtcaacgatgtgatgctttcacctgatacgccggacgcttagagcatcgagggaaaagccgtttctgtttgattgcacttttcggtcacgtgaccttgatggggaaatttctgtccaaggaaaccttttgatttctcggaaaaccgcggccaggttctctcccgttcatcggtgttgagcttgccttccaaccccgctcttggcatctgggagaaaaaacagactcagagacgcgatacgagctccgactcgttgacggaactaacacagaagagtttttgtgccggcaagttctgtttgcgcaaacattcaaattaattaatttagtttccgggatttctgaaaaaaaaaatgcggtccacgagaaaaaggtcgttttcaatgagcttccaaagcttttcgtcgtcaatagcgaagcctctcgcgcgaaaactcttaatgccatgcgtatcacaacttttctaggtgttttcacggtctgcattttcccggccgtgaaatcgcaagcttttctgtgtcgtgagtggagttctgactgtgatatgattcgattggctcctgcaaacggacaaaaccttttcaaggcttgttgttccagtttacggcaccgagcccctttcggattggatcaaatgtctctctttagtcctgccgaaaattgtgagtcatttcgcatcgaaaacagatccatggttcatgcatccaatcacacaagttttttttttctcgattgaaccaaagcaaccgttatctcctgcagctggtcgatgagggcacgaaaatacgtcgaaagtactacaaggatatggaaccaatcggagtcgtcatgaagctctgcgcggaggggccgcatatcatcgctgaatacgtgggttgaatatttctcccgaaaactaagggaaattcggcgatcgtggtgttggcctaacttcgctcgaggtggcgtcgaaatctgattccagccggaaatttggcgcttttcagaccaagctcatgaggagcctcctgaagaagataccggtaaccgattattcagctcacggcgttctctaggctacttgtcatgatggtcaagctcgtcatcaaatcaagtttttgatggacagctgaggcgcaatcgtggtctcagtacacatcttgagatcggattctcaagtgccgctaagttacggtatatgtctcacggagatcagtgtgggaacgatttaactcgggagtctctcgttttgcagtcagacgttatggatgtcgcggactacggtgcgtcggtttgcgcgaataacaccgctttcaagttcccaccaaagaccataaaaggtaaaaacgttgatccctataacgtcactttggaaaatctcgatgatctgaggggaactacgccatcgtcgacggcagcgccgggatgaagttgtgaagccccttcgacgccatgtcgggcaatgggaaacctggacactgttgttgcagaataaaacatcactcgttcctgtccgagttcttgtctgcgtcccaggtcacacgaccatacgggattctctacagaataacccgaggtccaaggaatcgttgcgacaaacatcccaacaaaattggttccgtagtttattctttcagcggacgggaacaacgatcgtcccatggagtgggagctatttcctttcagggcctgttaactccccaaaccggcgccatcgggcctacgagaggccaatctatgtatcggtcagatttcatgtaggcttcaatcgcgggcagtttcctgattcgctcgcaataagcagcgatattggggaaggcctcggggatcccttcatcgaggaggatgtgccaatccaaaaactcgtacagatagaagtcgacatacgtcagcagatctcccatgagccacttcttgttaatcaggaactgatcccagtttttcagaacggctctgatgtcctgaacgtagttggggtacctcaatttgtgagggaaggtgctcccgtagcagtagccgatgatcgcagccctggaaacgaaagtttcttcggagtggagctgtctccagagctgggaggttgagtcgaggttcggaagaataccatcgaatcgcctcgaaactcaccgtaggtccgtgacttcctgctcgtagacatcgagatgagcttgctgctccaaggaggagggaacgagtccatgtttcctaccgagatacctcagaatcgcgacactctggctgagcttcaacttagagccgtccggtttggtttcaatgtagtagggaagattagggaactccatacgggattcgtgggccccgccaacgaccgccggagacgacgtcttatccttgggccagtcgttgatcatctaagtccaacataatcgttagaagcccgccgtctctcgattgctaagatgggaatctcgtgggaatgactctagaaaactccgttgaatagcgccggctctgaaaccccaaactaccaagaacctccgcgttttaagctcttgggatcaccgaggtgtcgaacgagacggggggatactcaaggagcgcctctatcgagttggttggcaccgatcggatccctgagccgcgtctcggttcgacgcgcgaagatctcgcttgtcgaaacctgattggcgtcgacgtgtctcaccttgccatcttttgtcgttccgtaacgcttctcttcatatttgatgtcgagatattccaagagcagacgaatgggctggcccaggcctcgcaaattccagtatcctgccagaatatggaaaagagagtcttagatgagctcgcagaaaaactgccgatccgatcacatatcagatcacaaaaactaggagacactgagcagataggaagaaagaactcctacaatcctagaagtagacgtcgattgaacaaccgtaattgctgtgattggttctacccagggacctccctgagatcataaaggttactatcgcaagaccaggcgatgcggccgtcatgcgctgagccctccaagtgctggaactttgatttcgaccgttgcgtatcgaatttcgctcatggagtggcctcgttggagaactcccgggccaactcgaccgcccacggtgattgggaacatagaatcccggactcaagaacgtaatgccaagaaaaactagcgttgctgcttgtcgagcgagagaacgacgaggataatttccgggtcacaacacgccttccgaagacatcagggcataccgtgagcttttcgaaatatggggattccctgctctatgcaactcatccttcgatcagctcaaccccgggtttctacgcgctggagctcgaagcgatcccggggaatcaaaactcaccgatagtcacggaatccatagcaaggctgctcactttcctgggtcgattgccgcaaatggcactcgagccggctgagttcacaattgaacagtccttgagagagattgagagagcgtctggcggtggctctgatggccgttggactcgatcacacaggcacactcttcgagctgtctcaaccctcacccacgggaacgatacagggattagacaagtgcgagatcagaactcgtcgtggtcttccgcaacttccatccattcaagagctgccgagatagatcgagctcgtcaggactgtgggattgtttcaccgccatgccaattgaatctgcatgtatgccattaaccgcgcggagcactcgacatcttgaaaccgaggaagaggcaccgagaaccgaccgaaagggggtcaataacaggagtgagagcggtggaaacttttttttttttttcgtctcaactgcatagcatacgggtacttcgtgaaatgcagcgttctccggtgtcagaccttacctgcgggccgacagaagcgcctcctagcgtgaagatcctttcacgtcgacatttaccagtgtcgcgtacatttaagacgatctctcggcaactgtgagcgcgttcccaatctgcgacaggatttcgcaacccgaatccttgatcgatctccccgttgcttcttcggcgtcacagatgcatcatcttgaaaaacgccgatcgttcccctataagtggaagcgttgtgcagtcgtacattataggttctcgatgtagtcggaaatttcagaatctttcgtcacgatgtaggctccttatgcttccagtgtagtgtcttgaatcaagccttgggttcttcgtatgacggcggcttcgttcccagcgagctctgtcaccacgttcttgatttctttgagatgctcggcgtaaatggaggcggctggaatccatgtgccccagcgcgtcacaattggctctggatttggttcacgctctttttgttattctgttcgtcgcagctcgagaatgatttgagcggcaccctcccgatggaaatcctcccacaggcttctacagcaggggagctccctcttctcggcaattttcagtcgtacgccggaacccgagccacaggcggctcgtggttcgttacacgggagaatttgtcacggctcagagcagatcttgctaggccgtgctggatggactcgagagggtgagctggccccgggaatactggacgaaaatgatgagggtctcaccctagagaggtgtcgtggcgaatggttctggtgacccccccacgagggcaggaagatttgggcaagtcttcccgtctggaccacttgatgcttgttcataagacgggcaggtggctcatgctaatcgccgtctcaagtcgccctagggatcctcaagcggaagctctgctgagtgtggtaccagagtcgaagtgaggatccccaacagactagaaacgaggtgagaatcgcgaatgagcagccgcggcgagataagcctcgcgaatccgaactccttgatatccagaatgattgaatgacccccctccaactcgctccttcggttacatctggttccgctaccatcttcgactagttaccacggtcaggtatttatttctcagtcgtttcacgagagcgcccctgaaacatgaacagagtcatcctgaggtgtccaaacctgtgtcggccagatgagcggagacggcgggtgcagttagatgaggtgacctctaacttcgttcgagcctggactagcacgcccggtttgtgggaaggaagaggcgggggggggggcacgagtccgggagaagaggttcgcgggactttgatgttccacggcattccatctacatccaaccggtgagtcattgaagttcgagcacagtgggaacactgatgagcgaatccaacagcgtcgacggagatcgcacagtttgtttatcgataggaacgttcggaaggcctgcttccctcgaatctgcatccgaacggatggatttcggaaaaactgtccgggccaagctggctcgtgaatcaccgggcggctgttgtggaaagtttggcgaatcggtttttcggttcgtttgaagagggaagctgtcggtgagacggggtaatctaatttggagtaggccgtgctgctcggagcgagcgctgtgttcctttcttctggagttttcgctcccttgcaatgagttaaataatggatgccacttggcccgtcgttggccaccgacgttcctctactttcctcccgtactcctgctccttttccctcctcgcgggattcctccgttctctctaggcctcggccgctgcgtcttctcttccgtgctcctcccaagttcatcaggctattcgttctaagtgcttgtcgtcactttgcggagcactgacggaacccgcgtagtcgtcgtcgtgacttccagagtcactgttaccgtggcctcttggagggtccagtttcggatcagggttcgtcgaggtcgtgttcctctttgcttatcgggggcttcgatcgctttgttcctcgcgaggggatcacaaatctgggaacaggagaaaagaagatgaaataggtatgactcgttgaaaggatcttcatagggctgttgctcttcccatgaggcctctcccttaggtcgttccgtagtctccgtaagatgacggagtacgcaacctcgctgctttctcatgaatatatatgcctgtgtgtacgacggctcttcttgttgggcgctcagtatgtgagtccgctgctcctgaggagtccatggagtaaactcctaaatctgaaaatatctgcccccattcaaaacgaagctgcgccgctggaggggctcacggcccgtgagtcacgggacactgatacgaaatctagctccgcctggtcgaatttctctgatcatctggtcgcgtcgcttccaatccggcgacgaaaggccaattcatgctgtttcactccttacactcggccgctctagattgagctatgaaagaaactacatgttccttgtgactttccgattttaatgtgttgttcatctgcagcgctggtcccaactggaaaagtgtgaaagggccttggaaaaacattgtcggaccgggttcaaaagcctccactaccgcgggaaaacaggagaaacacgccaggagtcaaagggaacggaaccgaacggatttcgctcaaaaacttcgctgatccctcgattctcgaatgccggggcctgcgtcctggacttgagggatgcggaagggctggttgacaagaatgaagttgtcgaaactcaaccaaagtgcaagtctcccgatgaaagctttgcctcgtggatggacggcctgggggcgaggcaccgcactcgaaagctccatcgctcgacactcttatcactccatttaaacgtggcagaaaagggctccatcattgctatcaagcaagcctcgtcgagtggctgaccgcactttgcatggacaagaccgatgacggatcgctccctcacggacaccgcatctcagtccctctcttcgcaactcttcgttttcctgcactccatcctccctctccgacttatccctccgacatcggtgtactcgccgcgagatacgcccgcagcgagctacgggcccaatggctcgtttctgttgccgcgctgaatccattgaagaattcgtagcgagttagcttattacattattcttcgttgcccgtgaggccgggcggttgtggctgtccaggtgtctagacagctcgacagacaacctgccggactcggaaccgggacttctccgacggctcttcgttcgcctcgacagcgaacgtgcatatcttgagcaaacgagacagtttcaaccaaacgagccttctgagcagtgctcgggagagccgccgtcgcgggtaattcccccgcacctctccagaagactgaagcaaagtgttccgaccaaagagcgcggctgctcctttggagccatcgaggaacggatgtgaagtacctctggaattttgttcggccttcgctccgagcggcctgagagaaccacaccccggcactagcccgaacggacccatgacgtccgcgacgtcgagaccttccaggaggctggggaaatcctctagccacggaatgattcaaaccgcctcagaaaactttctttcgtctccttcgaataccgtaccagagtggcccgagcttgaaattaaatccaagtatttacagatttcactcggaagtctcggccgatcatttccgccaccctgcgatccaacctcgaaaatttagcagagttcgcgttgatcactccgattaatgatgcatgctgatatcactcggctgcctggaactcatcaatgcggccgatcgaacgaacggccggccaagttcaccctgcatgatgtccgacgtctggatgacgatcgctggacatccccacgttgcgttcgacccgatacgcttcgtacagcaggtgattacggaggccacatacatacgaacaggcacacgcataaacatgtaggaagctcccgcgcagatgtactcgcctacagatggacatcgatacacatacattcagacacagataggcccttccgacgacgaccgctgcaccctgcggttcactccattcagaataggccggcccgattctggcgattgcgattcgatcgagatctgatcgcgcattttgggatgacgaggaatatcacttggtccagctgtggcgcgatgtcacaattgcaacgacgtacatgggactcggggcagaaattctggagttgaagaggtcaggactcgaaatatcgaaaaattctgttcgatcgaaaactctgttccgtctcgtctatccagttttcccatccagggaagctcataggggtttcccgaagtccgactcgggagcgcaatacgggattcctggagcacttcggttcggaactcggcaatcaccctccatgctcacgtagatgtgagtgaatctgactttgattgcttctccggagctgaggtttgtgctgccttcccgatgacgggaaaccttttcgccccgaatcagcaaggtccagcccgaatacagagtttcgtaccttcgcccattgatgaatcgacgcacggttaatggaaactgattccgagattggaggttggtgtgggaataactcaccctttcagcgtgaaggctaagtacgctctgtccggaaatcaccccgtgtacaaagaacatccctgggcctcgtccgcctcatgctggagatgaaatagcgagcctcacgattcgtaccccgggatgcaagtggtgagggattgatcatcatcattcgacgagctccggggctctggttctcaatatcgaataatatggctgaggccactggaatgtttcagctgccagctcttgaccttgcgcgaaggtctagccgctgacgatttctctcacgcttgagacgtctctcatcaccgcgacacagagttgaggcgaaggtaacgtatcacatctataaaaaatgccccatggggctttcataacagatttatgatttcaccgacatcggtagggtgcccgccgagaagaacatgcccagcaattgaagagcccagttgcaagacgtcacagctccaaaatcaccgatttcagggctcatgcagaatatcgtaggcctctatatcctgcactccatggtaaatatgcaaattccgagatcggtttcttcccatattcgtcctaaaaatcgggttgcacaaaacgaaagttatatacttctgtgcatgcttccaatgtcgtcgagccccagctctctctctgataaacatcatcatctggttcgaattcggaagctctctgggtttcgcgtctcgattccctccacttccgtgtaaaggtgtcgagatttcaggcttccaaattcgaaacgtcacttttccatctggccggtattgtgttcgacagtttttctgcaggaatcccgattgctattcacaggaatcgacagctctccgcggctgtgttaacttgatttagtatcaagagaatcccgtccagtgcataaacggccacagctttccgtagttttctgaaataccgaaaaagtggagacctgacgttttgaaaccgggctcttcaattggacgagttcggcactcgaccgaggggccctgcaagatttcgatgcccgtcgtcgttgatcagcgagttcaaaacaccgcagtatttccagatgcccctgaccatcggttctcacagaaatgcgttcacgaagtttctctccgagagtgattgctcagcttcggatgtatagcgggttcgaggagttttggagcgccgagacgattttccgggaggcaaggaaagcatcccctggtgctcccgctctccgagctagcggcagatgcgctgaagcccacgaatgagctacaggtcaggagaatcgatgtgatccgagaggaggaaatagcagtttactacgggctagaatcacgaaaacatctttgggagcagccagactgtagaccgaagtcaagttcgtgtaacctaggacgccacatcgtgtccaggaatgggtatgatgggctacgcatttgtgagtcagagttgggacacgtttctcgcccccaaatcgcacaaacgttcgcgatccctcggccgacttgtggccggagcgttcgcatgccacatgtttttacgcataccaagcgtggttctaaacctccgcggcacccggcagcgggtatgaggtgtaagtcaaggcggcgaggaggtttgcctgggaagctccgtaggaaccgctctggaagtcggagggtgagctgtgggctgacgcgtcgacgagcggctccttgatttccagagccctcctctatcaggacggcgtctggtttgatcaagtattccgcactagctcgggaaagagtcatccggggagttgtttccatggaaaaagatgagcgatcgagctttgccactgatgaggcctggtgtctgaatcgtttgcatctgcgtggttctccatctgttggcgtcatccttccgctaggggtgaatggaagccaccgtggtggatcagagatgtcatagttcactatcagaccgaatgctcgcgcagtaagttatttcgacgattcacacggccttggacgtgggatgattttgcagctgatggtggttatgcgtcaaagaccagggacgacagcaacgtcagttcggagaagcgatccgtagctcggttgatgacaaggcctgagaactcggcgccgatcgagggtgttccctcaggacaagcctgcggtcgcgcgccgcagcctccatgcagcgagttcttcatattattatacaatacaatggtctcgacagtctgctgcggctcatttctggcttcccgttgagtctttgagctccgttatttcgccttgtcaccacagcggtgagcctgcaatatgctgtttccgaagtggatcgtccgcgctgtagcggcttcgttgattcttgaacttccctcttcgctgcgagcaatgatagccatgagaaccaaggaaccccggctcattgattggaagaacttttggtacttcggaaggtgcttgcatcgcaaggagatgcatattccagacccgttattaatggtgagagcccagccattggccaccagcgtttccgaatggttcggaagcccgcttgaggtcaaatgaacttccaggctcgactaccccgtccgcggtgagtgttgtgaagtcgtccaacgggcgaatattctcttcaacacaatcattcaacgcagcacaacgtattgccatgtttttccgcacgagctggttcggggccgctgtggagagtaccatcgccgtcctatcccagttacccgactcgaaattaccctctctcaccgccaaatcctcacgctctagagtctaggtctagagtcacgacggatccctaggagaagcataggaactgactgaaagagatat

SEQ ID NO: 85 - DNA, 133300 bp, Phytoseiulus persimilis
  source 1..133300: mol_type = genomic DNA
  variation 105452: allele = c; note = SNP_2
  variation 109775: allele = g; note = SNP_3
  variation 115020: allele = a; note = SNP_4
  variation 115073: allele = t; note = SNP_5
  variation 125940: allele = c; note = SNP_6
  variation 131548: allele = g; note = SNP_7
  variation 131555: allele = g; note = SNP_8
gtagccgtatttgcccatagtcagtaaatagcatattcagcgcgcatctgcttaattttttcagccttccgaggaggatggagcttctgaggtgatttttccggtgaaaagacagaacggactcatgaagtcgtcgctaggattgactttccgagcgcagaaacgacacttcgactacaccggcgccatgaagctcaagtgcacggttaccatctcagagtctttttcgatgagcagcgagaaaattgtcgccggaatcgatagcagaacctaccagaaaggtcagttccgctctattttcccaacgatggtcagctttgactcaatccttgactcgcctctccagagatatccgacgtggaaccttgagtttttcacagcaccgagttcttacgcgacagtgacgactccatcaactcggcgatgaggaagcttggacaagaactaggatcgcaggacgaactcggaattctttcgaacatgttcgtggtgttccttcctcccgcgcaaaggttacgaaaacggcacggggcagtcgatccgccggatatgaaagatggcggagaaggaacagaacaagaagccggaccagctccgcttctcctgtcctgctcggcatgagtgattatgacgtaaagccgccggctcgtctgcggaaaaaaggctctttcgcaaccgaactcactaatgccccaaccaagacctgcgactaacacccgagcctcggaaatccatccccagagaaacttgataagaagctcctgtctgagcacaggttatgttaaacatgaagcttccatttcccgcatggaagcatcgtcggagagagctctgagaaccccatgctcaaagaccatctggtcaagatcgtttgaatgcccaaaagcgcgactccatcaaaacctactggagcagaaggcaaccgttgggaacaaggcagaacagcagcaccacttcccttcccgcacgccgatctccctcggaatttcttcattccctggctcgatgttcctcccaaacttcacgctagacgacttccagggtcgtcctcaatcggccgagatccgaagacaatcgaaaaagcgatctccgtatcgatccgatcgagccgacggagaagagccagacgggagtcctaatggatcaattcacgggagacatagccagcggagtcggttggtagcattccgaagtttcttcgaaacttgttcacagccggcactcgaacctattggaaacaccttccgccgccgtcgactcgatcatcgattccccggcactttcgccttcggatgattccggacgaacgctcgcccctcattctgtctcaccctcgttgagcgcccttcccaggaattctggacgacggcgcccgttggtgctgttccgtcgttcacgcgacggggtcaccgttcgaccgtctggacgtggatcgatcgcggacgacgggaggtcagcgggattccctccctgccgctcggttcgatctcggctagatttcgcgtttcgccgcacgctccggtgaacggatctcaggtgcacggagctcccagagcgtgggtttccattgctcgtggaggagcgcgttctccgttcggatgtttattgccctttatcagcgaagccgtagaaggaagggcttcagccattgaatcagctccgtgagatgaagcgattgcgccagctcccacacctgcgttttcgcccagcggttgcctccaaatgtctcagtgcgctgaacagcatcgatggaggagaaatacaagggcttccgtacctgcacatagctcgaggcttgcatggactcgctggcatgcgcagtgacatgcagccctatgttacatgcagtcgttctgctaaagccctcgagggaatcgttttctcgcaatgggagtgtttgcatcgatggaccgttgatgtagtcatctgcgacagtggtacccgaccggtgtgacatgttccggtgctccacgatcatgtccccgcagacgagtgacgttccctcgtagcaacagagatgattacagaagtattttctctctcgaaagccgccatcactgaagaacttatcgaatagagagcctggcaaaacggtgaatatctcgcttttttgtccggcaagttcactccggccggggtcacaggatgttctctccgactcattcgtcgctattcaggactccgatgtctaacggcttctcaaaactaccgccgatcgcagtccgttacatcgaagcatgcgtaatcatctgcttctggtgagccggtcgtcgagctcgagctccaacgccggaagaatacgaggaacctctctgcgtcgaacaatgtgcaagaatgcatctacatatgtaaccaacgacgagccgcggcagtttcgggcttgtggaaccccatccgcgtcgcgagaatgcagctcttcagcatcgatcattcatcgtatttccggaattcagcgcggtcctatcgtcaaccgtgatccggagccagcacgctgttcgtctcaagcgccttcgaccgatgctggaaccggagtcaacggtttgcggaggggagacgaagctgctccgcgacaaaacgcgcttggacagctggtcctcgaggtggggagcttgagaaggagtgatctctgtcggattctgggactgctgatgagttcggagaaacgcatcggctgctgatttggagcggaagcgtgtttggatgtcccggtctcggcttaccttccaaattgagatgcttcccaaggtaccggagacaagcaggcggcttcgcacaccgtagcatgcaaaactagcaagaaagatccttgtcagaacttaaacctatgatgtgacacaaggcgctgcggtttctcgacagcaaagaattcgatacatgtccacaaacgaaagagggaactcaatctcaaaacgtcagacgaagcatgcaagaacgacgggactagcaagacgacgaccgatgtcatccgaaaagaaagcgcatctcgcgtcgaggtgccatccagagtcttcgatccgacaggacattcagagagccgctgcccgcccagtaacgactatgaatcgccgaactcatttgaaaacgtccgcaaccggtgttgatttaccggagcctactctcgcggttcacgccgaaattccggcatgcgtcgcaactactgcagcgctcccaatcaacagcaacgttcttttccattaacagagattcctgacgacggacccgtgatatacgggggacaggcgcattaccacgtcggggacaccatgaacgttacgtgcatgtacactcgacaaggcaagcccgtaactctgcaatggctcctgaacgatgaggaggtgccggctcgttttctggttcaatatcatcccaagaaactcagccaaggacgtttccagacagcgctgggactgcagttcaccggtaagtgaccttggcgccccatcgcgtcgttgagcgaccccctttccgcgagcgcccggtcctccgccggcgctcaccgcgggccgttcgctcgctctggaattcgttgcgaattgctctttccaccgcggcttcccgatcgcggtcgggaattgccccaggcctggagctgtgactggtctgcatcacacattccccgcccccttcaccccctggccccgatagagaaaaaaacacacgcgctcacaccaacacacaaacaggtagacgtgaagtggcatgaagcgaaatgggttgagatacggcaacgacggcgcggcaaagttgcttgattggtggctggcgacacttctcgctgctctcacaagagatatctaccccggcaacgagaggaattccgtcctgaatgaatatgttacgagacgcacgtgaaagccgcataacaagcggagcctctctcggaagtttccgggactgaaagtacttccgagacgccggcggtttcctcctccgaaaaaagcctcgaggcctcgtctgcgctgtcagctgcgtcaggttccgaccacattgccgctcgaaacccgcgcagcgcgaaacttcctcagtgccagagagcaattctggaagcggtctcttaccgaaaacctctcggatggatgtcgaagagcctggcggaatacatacaggtgacccgaagccccgggtccgtacgattcacgtgagggatcaactgaaaccctcacaggccccagtttttcaaccaggagctccccatgcccagcgcggcctcagtgccaccgactgtggtcgagaatgagatgcgctctgaattcgactgatgaggatcaaaattccatcagcgaaccagtagactccatgccccactgcgaattccccgtgccccacgttgagaaacactgaactaggaaaacaatcggccttcccagaccctgctcctgctttctgcagaatcgatgagaccacatctatctgatccgtcagatcgaccggtcttcgatgggcgcggtccaagtcttgttcggagctcgtgagtaacactgggctgtgcttccagttcgatccggacactttcaccatgaccagctccagctgaagtgcatcgccgaggtcgaagggcccaagagaccccacgtgatccatcgctcgccggacggctcgagacggagccaacagcaacagcagcaacctccgtcaatttacgataacaatctcagtcaatgtaagtagactctgcatatcgcagggaggtcacgcatcctgtttctctggatcgggttcgtgaggagcgccaacgccgtcgttcgctgggggtgctttcggagtgatatcatcacactgtctatttttactcgaagacagccccatctttctcccaagaatcaatccgggcgtgggctttaagtagatgcaccgcgtcactgacttgagaaattccggagcgtgaaattatcatcgaatcgtttacagactcttcgagctcgatgtcgagaacgagctcaaggactgcggtcgacgcgtcgacagcgttactgacaacggcactggcgtttctgctaacgtcgaggttggcgtgaatgtttgttgatgatatagatcaaacttccctgtcgtatctgtgaatgtgtaaatacgatcgatgttagaagacgcactactttccaaatgcatatcggctccgctattctcgtctgcatatcatttacaatatgtctgtgagcgtgtgtgtgtgtgtgtgaaagttgtgtgcgttgtgctaccgcccgccggtttgtccgttcgcgctgccgccgccgccacgttcgttcctcgcacgaggcacaacgaagaggaagaaaccacgactctggaacggggatacgcgagaaaagagataagcagacgaagatgaagaatcggggatcggccgagaaaccggagcgataacagagaacgccgaaaattcggatgaaggattcccgcagctgcgcagcgattcatgagccaatgcagcgttcataacacctcggaacgcctgtcggacttcgagacatgatcgcatccatagaggacgcgtggggtcgtcatcatgatctcatcgatgggactcttggagcagagggaaagtggttgaactctcgatgtaacggtatcgtgaccgatggagtcaccgatgagtcgcgttccgggtgccagagagcaacgcgagaaaccgaagactcaagcaccaggtatatcgaaaactccacaccgcatgtcatcgagcgaaattgctctcgaaactttctgaattagttctccgacactgttcgagccgggatggatgctttggttcgcgtaaactttgtcgcattgtaaatatatcgaagaataaacgatgaaatgtcggaatgaatatttctattttacattccaattgagcaacggtctctttcttcaacggagcgtgtcggagaggctgatcgaataattgcaaaagtgcgagtatttgttgagcgatggaactcacacgtccggcgcagtggggctaaatatatgtttctccgacttgctggggtctgagggttactcgtggatggttcctctttcgtcgcgaaccatcacaggcaagtgagggggaacgcccatgatctgtggtcaacagatggtaatctcaacgagtcttgtctacaggttgatcatgtcaacagtcagagtttcatacatttctgctactctgcaagtttgcgatcaggccccgcgcctgactccactccgtcgcgactcggattctgtccatcatcgtcgacgagaagaatctatggacggcacttctactgcgggtgaatttcgaatagagaagtatacggcgtccctggagaacgaagctcgaagaagactccggtgtcatcgcggagctgagcgagcgttttctgaagctcgcagtgggtcctagagctccaaaacgcgtttcgaagcctctcgaactttctctcaaacgaactcttgtcctaatgaacggttcgattcaatcgatcgtccgaaacctgacgagaatcagtgtgttccgcctccggggttgttcctgctccgccatcggctcgaggctccccttgaccagacgcgacgcgagcaggatctgttcatgatttgctcctcgttcgatagtgctgctcatcccgggcacaaaacctagatggtgggtacatacgattgggagagggaagcccgtgccgaagaatgcggggaacaaactactccgaaggtccccaatttttcggtgacgtttactttcgagcctccccttcctcgatcgaggaaagaacaaactcgagctcaacccgacttgcggagcgaacatggaacagcgggggtgctgctgtggaaatagaacgagcgtgtccaccaggcaactatgatgggagttctctcatggagcgtgcaagacccacctttggtatcattagctttctcgcagctaattacagcgcggcagccacctgtcacggtgctggttttttgccgctggtgacgtcaactgacgaagccagttcctttttttttgtgacgagccgcaggtcgttcgaggctcaaccggaaggaatgatatgacgcgaatatcttccgtgattctcctggcggggcacaaacaagcttccgaaagcaaggcaaattttcggcgaccgccgtccgcaccgcaggcacttgaagtccgcgtacgaaccgagagaaaggagagcctatccaccaaattgtacgtggattcctgtacggggaggcttatgagcggtgtctgtatttgtttcatagctgttggcgacattctatcacagccgcggccgaagtcacacgaaaacggtgctccgataacgatgccatctgtgtttggaccgtcggagcacgtcgcacgggacctcagacgcgactcaaaagctccaatcggatggaaagtattctctccccatcgtttgtgcaggattcactccttggcaatcttcgaaacctgcaaaaagtccaggcgtggtttcccggtgattctgtggaggagttcaccgcggaaaaacggggaattcatccgcttgtgtggattccaaggccgccacaccgaccgcgctgaaaggtacgtcaccgtctccgcagctcacgatgacgacagcaggtagaacgttgacgccacccttggcgtgatgtcggcaacgaaacttgcaacctaaatgtacccaagaaaaagttgtcgtgtcataccatagttgccgctgcgtcgagctcatgcagacaagtcgtacctccccgcggaaatgttccgctggcgagattccagagagcatctttcgagacgagcgcccccatctggaatcaaggctgaagcgaagtagagggggactggtcacgctcgttccccgaaaatgttcgtccggcacctgagacatcatgctaatgatctttgggactgaccgctcattccccttcctccctcctctaagaaggtgtgggaatgacgttggcccgcccctcgaaatgagcccctgaatctcggagagcttaggtggcggttaggatggaaatatgacgcgctgctcgggttctccggattccggaggtaggctcctcgaagacaatcacccaggcagtgcaatagcctggaggcagaagaagattcgattcgagttgatcgaacattccggaggcgatccaaccgccccctcttccccggcctccatgcgattgaagagctcgctgaagcagggcgtcctcacgagaaggtcgggtaccagttacccgaatccaaattaccctctctcaccgctgaatcctcatgcgcagaagctacatgtgcatggcgaattgctcgcacatggaacttcgaaagttcaagtcagccaatgctgcctctccgtcgagtatgacgggttgagctgctgaaaggagtggctgaagagtgatggggagaatctcttgttatttattgaagtttccgatatatctgcttagagcatgttcgccgtaagctcctgcgagcctttggtgcgcctctgtcgcattcatcttcaagttgaacaagaagagtaaaacttgacacaaaggtcgaaaggtccagcggttcacgtaaaatccttgaaagtttcgaagctctcgcttgctgatgcaaatggagcgcacgtgggccgcgaagcaagatcgcgtcaactctgctggtgggctattgcgcgcgcattccgggaaatccggccaacactgaaggactcagtagatccccgcgactttccgcccgtgggttttcatggttctcgagccatatttggattccgcatgtcacatctgaggctcgagatttgtggaaatacactgtagacttcgctgtacttcaatgcacgaatacgacttcgtatattcgtatggactccacccttgttgtgtcagaggagtgcatatctctttcagtcagttcctatgcttctcctagggatccgtcgtgactctggactcaacagcgtgaggatttggcggtgagagaggttatcctggagtcgtgtaactgggattcgggtaggacgacgacaacggatgtgaattagctagaaaggagcgtcaacctccgatatactcaacgttttcgtagtcgagtgagaaaaatcagccctcaccgtactctcgaacgaacagtgctgcgtatcgagtcacttgataatcaccaccggtctttatcgcctggttatcgctcgaggtagcttgtgcgattcgaacactcacctcagcagactctttggagcgcgaagcgagcgagcggtcccgccagcgaaccagagcgacccagacaggcggtgaatgatccagctcctgtgagtgctcggtagcgttcttattctttctctcgaccttgttccactcgttgttcggtcgggcccccacccgctcacttgatcgtcctttcgttgaggtgctgacatctgaaaaccctaatgaaacagctcccggccacaccgtcagatgagaacaatggagctaggtggcattgtcgttgccgtcggggtcgctgttgctgttgtcaggagcttcaggacgacgcttgtactggggctgggttggtctcgatttgccactgtactaatttgggttcccctgaagcaacttcgcattttcgggtcctcaacacacgaacccgcctctcgagaaattctagttgagcgtgggagttcctctcgcaaatcaccgagatttttaatcggtcagtatcaacatcggtctcgaacagtttcgaatccctgctctgacaggacgagagtctgggcggaatcatgattttatacctcctgcccaggacagtcgcttggaagccgagctctagcgacaccgttggggcttgtcaccgcgtcgtctcctcctgtcaaggcttggaatgttctgccacaatgagttgagcaacgcccgcggcttgaagcacgttcggtcatcttctgcgtgccttgtccgcgtactcggtgttgtttgcgcagaggatatccgccgacgggggcgaaccgagaaatagcagcggagagctcggaggagcgctccggaaccacgacccagagggtgacgtcagggggcggccgccacgagctgtcacttgtttgctgtgagctgaaccacactcttcgacagcggcaggaaccgagcatattgaccaatggcgtcgacatattagcatctgacaaagcaagactatcgtcgttgttggtgttgctgctgctttagccgtggccgccgccgccgtcatcatcgttgtcaccgccaacaccgaccatacatacgacagcacacaaaagcctcgcttgtcgacacaaaagagagaaatattgataaagagatagaagcgagaagatctccgcacatggaaaaaaagaaaaagcacagccgccgtctgacgtcaactccgtttctagggaggcttacggcaaattatccgataccagttatcgcctgcgctgtcgtccgcatcgaagtgggaaaaaagcattgaatatatgaccgcacgtaccttgtcatcccgatgtttttgcctcatcggtgtcctggtgcatcaggactgggttcgtgagcgggctccacaccgccctctcggcctggagtcattcccagcaagcacctgagatagcgctcggcttcagtccttgattctctggcaccatcccgtttgatgattcgaactgggattcctccgaaaatgaccggtgaacaactgcggggggaaatgtaggtgtgccatcgggatcggctgcttcgaaaccgtggagagacagaggtggagcccagcgtccgccagctcatctctcgagagccacgaatcctagagtgatctttgaacattcgctccggatcgatcagaacgtcgtcagacatgtgaggaatctgcgacgtttggatcctccagctgactgaactagggaggcacatgtgtcaacgaatcttctcaacatttgagcaacgaatgagaaatgtgacatgcggggtgccgtggatgatccccccaccctgagggcttggatccctatcccgctggattgcccaacatcgtactttcgagagcctcgattcccagaaggttcgcatgagccgacgcacgaagcccatcagtcatgacaaatctgtttggttcttgaactcggagctgtggtgtcaggtcatgcaacgctttgcactcatgtcatgacggggcctggtcggggccgcgatggaatcctggggttgcccgattggggccgtgataccttgggtttttatggatctcatcctccagctctccagctcgatattcacgagagggtcgcttccttcccagctgagaagtggctcacttcggtgcaattattcttctattttcggtcccccatctggagaacaacggagccgaggttcttgtgaaaacagccgcgacttcgctgggattggcggcccacggggctggaattgcgaacaccgggaggaatagactcgaaccagcatctggggaacggaaatcagcacgacgatgaacatcggcccccgcccctgttcgatcgtgtctttcttcctacgacctgattcgggttgagaccaaaaccagtgacaacagaggagagcggcgttgcgcattataagaacatgatgattcagctggactacaacaacgcagtcgcgcctggcctcgaaccacagccgcaataacctaaaacgcatctgaatggcaaacaagctgagtttcgagactctggcaagcgtgtgaacatggcgcgagttgagctcaagattctgcagcgctttcgacgatcgaacaagttgtaatgcgaaatgctacagcggacgtcagcgtgggagactaacaatcgctctcattgagctccgataattcgggaagttcgagaatcgagctaattcaaagtcgtgaagcaataatgagggatgggctttgggaaaagcttgtgcgctcccgtgcgtgaacaatctggaatctttcgataatacggaaccctggattagctatcgtacgccgccgtagccgagctctaatgccgtaacgctatataaatgtcgaacgtgttctactggcgacggacggtaggtgcgtgcaattgtgggcgcgtggagctgtgagcgaaccctcgataaattgagctcaatttattaaattgtttgacctcgcagcgcgtcaccggagctccgaagtgaactttcccgccctccagactctgagcgaaggataagagttcttctccggaatgaaactcacagaaaaaacggtcgtttcaacgccgagaggaagtgatggtcgagaatgagtgctcaaaggatgacttgcgggagaaaaggagtcgactggcctcgatgaggccgacgaacaagcagatagacaggaactccttacgacaggagcagaaattattcaacatccccagttgaagcagtggccggatcactgatcacaccggcgatgctgttatttacagatgttgcatccgccagcgtatcccagggctcatcagctgttcgaaactcgagcggagttccctctgcttgaagtgcattattaccactcgcgcagaaacggcacccctgatacccatcatcactcacgcccacttcacgtgagctccgcttggcaacggaagagttcgcgattgattttcgatcacgcaggcactattgaatcgcagaagtgaaaatcacggacacatggcgaccgaaatgagcatcctgttcgtgagttgagtcacccgaagtggtgggtttccaaccggcctattttcctgtgcttcgcgtcggaagatggctcgaatactgaagctgctaagatcgtatccagggatcggctactccacggaacacgatgttgaggacacttgcgctgggcggaaatcaggttcacaatgctcttggactctttccagggaattcctcacggggagcggctcgaccgagctcaaaatatgagtagaacctaacccactccgcccctggcagccaggccagccttcgttcggaaaggagagtttcgaggatatcgaatcggggaagtgatacccagtcgttccactactctcaatgtttcattcgagaaggatcccggcacacagacctattcctgcgaacgacccggaacgttactccgaaggtgacgacgagtggaggtcctctcagctctatggcgaatgaatttccttttcagagttcggaaacgttcgcgcggagagagtcactcgtgcaggagtgcactcggaggaagtacacacggggatgtacccctttcctaactgatagttgtggagtatgaagcgagcaagccgaggacttgattccgcacgtacaagaggttccggtagtgctccgccacgtctcgcagaaacgaaatatttcctgactaggaaccgagggcggtttgctcgttctcgctatcaggaaccaaccgaagcgcatgagttggtgatacttggctttcctgctgcgttatcctcacactggagacagtttgagctttattcacagtctaagagaaagagaaatctgggggcaactcatcccgttgcactgatggaacaacaactcttcatggaaactcctcacaatagaaattttttcaccgcgaagagttgtagcagaaaaatccttctgctcccacacctatttccttcttccacagttcgtgccattcgctgtaaagtctggtccagccgaactcccccgaagcgaaactgatagtcgcggctcggcatgttcggctgaacaccggaaaacctcgagataagcagtcattgacgctcatctcaagatacgagactaccctcgagtttcgaagcaagtttccaaacctcaggcaaaagaagcaaactgggacaggccgccgctgacttgccggaaccgtaccctactagagcggcatttcgcaaggatagattctcaataaacttcaacgagctggatttatcatcggaccagaagccactccggcaatctgtctggaagaagtcaaataccaaaatttctgaattctgagatcgcgaattagtggatgcggaaggagaaatgttgcgaagtgtttcatttcgaggaacaattccgcatcgagacggctgaggcgcgtttggatggtgtcatctaagacaaccgttcgtctcgaagagcgacagaaggcagaatctgtctattgatgtttgattacctagaacagctagactaaattttgttattgtctcaatccgagaggagccttactgctgcacggttgagccagctgtcgctccgaacgatttcgcccgaagtaaactgtagtccgccttccgtcgagaccaacggcccatggatccatccccgaaaaaaaatcgcccaaggtaccatttgaaaaaatggctcggcagacaatgatcagggaggagcctttagcccttcccatctacgaacgccgaaaagtgatgagctcgagataaagacgattttccgaaatcgtaggttttgtgaccgctgtggaagtctcgctggtttcatttttcctcgcaagaaactagccgcagccgatggctctgctattgcgaacacgatcagcaataacatccattctgaggaatcgagttagctgctgaaatgagcgcattgtgtaagaaagaacgttctttgcacaatgatctgggaaaaatttctatacatcgcgatatggcccccaatgtttctgcgtctaccttacgggagctgcttacagatcaggcggtcttcatttctgagggaagttcggaagcgatcgacagacgctctgatttctgcgaaaatctttcgtatcatgggtaacggtcgtttgtgccaacaacggggcgcaaatattgatggcttctcggagcctcgcatgagcaatcaaacgaatgaaaccgtcgaacatggtgagctagctctggaagcaatcgccgcgaacttccgcggacaaacccctcttccgacctctggaattagggggtccctgagcttgtcgggatctcaccaatgggctagactctcaaccctcaacgggcggaagggcatcatgaattcacaagttcacgaacccctatcgttgaacaagaagaaagagttctacgtagaaatacgaagcaacagtgtcactacttggaaaaaaatcaaagtggggggttccagagcatgccaaccgatgattgccttgcttcaaccccccaggtgggttggttcggtgttccgtaccgaaggatccgttgtttgcctgggcagaatgatcgaagcctcgcggggaaggaacactgccctggactcttcccgaagccagttgaggtgtccgatcagccgatggacacctgagcgttgaacatccgcgacttttcgcggcaagacagcttgtactagcaagagaatggatgacgtgggggattttttttcctcccgtgactcaccgtgacccaaccagacgtcctcgcccagctcagtttccttcgttgcgctccccagtccagcggatccgaagcttttgttgtcaggtgctcggtttgcaccgccggccgggaggaccgaggggggatttcgagggacgactcaaagtagacgcgggggctttggagcagggagttggcgggaggaatgtgaggaaggagggcgtgtgcaggaggtctctgagctttcacgggatatatgtgggttggctcatgcgatggttcgtccggttgctggtccctggagacgcacagcgaatagtgctttttaatgtctctaaaatagacttccattagacgaaggcgttccaacaaacagaggctccttggaggtccccgcgagatgagcgacgaacgccgcctacgttggcaatccagccgaatttttccgtcatccggctggaggaaaacccgaactccagcgtcgagttcgggtcacgtgcgcccacgaagtctcattgcagtgttattggttttgtagtgtcaggtctcgactccatcgaatcagcctttccgatcgccgagatgacgaagtcgggggggatttaggagagcaaaaacaaggactccttgcgtcgggttcagacggcgtcgggcggggaggacaccattgcaagacatcgaactcgtagaatgggaacagagagctccagaacaatctcgagcgatggaatgcccgttggaagaacaccggcagtcgttcgttcccgtgggaggggaagtcatattgagtatttttgacgattttcccttcgtgcacaaacatacgcacggactcttgaataagaactctccgcttcgggatcaccgattgccatattgagtgtgacttggagcgttacaatggcacttggcctatttgaatagtaggtcttgcttccgcgcaggaatgtttggtatgccctccatttcccttctctcgctggcaaacacacagtgacagtcgctcggccgtatgcaaccgtggatttttcgttgcacacgctcccaggacgactcgacgtattggacaatgagtgccagccctccggcgctccaataatgttcaactcgaactgcgtgctggccgggcgagagactaacttccaccgaaaagacttcgacgttccacagccctgcgaccagactacaaggtacgattcagcgatcaattccggaagtgcctgctccattcagcgattatttgacatatccaagacgaaaatcctatttgggccgagcaactatccgctcattcgaaagagcattcgcctccacggatgaggtggacccggatttcatgccacatcgagaaaaccttcgctcagagggagactctttcggatgtccgtccccatcatcctcgtttacgggaacggcccgcatcctctcaacccggataatttgaatatcgatccctcccaatgttcaacggaacactccttggtgaagcactcagtttcatcgaggtcacgaattcttgcttaaggtgcgcgttgaattcttgcctctttgccatttctggaaacgagtcggtgccacaaaggcgtaaattgacgccgattcttctaatttttctccactttcaaagatgttcccccgcgtttgcccggacagacagcctgattcccgttcgttcgaggaggattggatacaagataaccaaacgctcctcacggtataattaccattggtcctaacagggtggccagaccagccgcctgcaatagaatccatcagacagagcattttcgccctccagccggaattttctcaggagagcgctccgccgtcgttgaagttcccgtgaatgcacgtcaaacgccagagacagtgatgcaatcaacgtttgcgattgatcgattctccggaccgggacgaatacttgcgctgcgggttccagaatgcacaggccgatgaataacccgacgaaaggccgtacatttgcagagggggacatgacaggccgattcagtctgctcgaaaacactgacggaccatgcggctgaaccgcggttttggaacgatttccgctcggacatgtggcctgtgatcgaagtttcccgagatcgaagcgcacgctggcacgacgcggtctctgcgagtctcgatctgtggagctcaacattttgatcgaaatcgccaccttccttcgagaactccaggatggcaggtgtttcgtcgctcacatctccagcgtagcgggaaaagttggaaccattttcagagagattcgacgttcctcctctgtcccatctctccgatttgaatcggcacgtgcgtgcgttccctcagtttggatttctcgaagcggctttccgaactcttcattttaagaggaggagaatcctccgctggccccgagagcgcgccgaaagactccccggagcatcgatggatgctcacctgggaaacttgaattaggcaacaaacgacggcagaacgggggtccatccgaccatccactcgctcacaacaacacaaggtagcgtcgaagaaagagggagattgacgaagggccccgcgagggacgaccacgcagacggcgcagagggaaggcaatattcggagtggtaagttgcctaattccaacagccttcggtagaacggccagcgcgacgatgcctgccaagacggacgacggtcgctcgatcatggaccggcaaggcgttgaatacacactgcgctcattcctgatttgttgttacctgccagcaacgtccgtttcgcggctcggaaaaagaggccccgaacgagagcacctgcaatcgaatcgattcaggcccatggtagggcaagcggtcggccgtggggctgctcgaacaggccattgacttgtggggctactccgatacagcccaccaggacgatgtttttcccctgcggcaaagatcctggaaaatctgagcaaagtctcccaattgtgggattgtatcaaatgagcatttcaggcaggcataacatcaagaattcgcttggtgtcccgcaatcgtcccgccctcgccagggcggagttctccaagagcaggaccggacaacacactcatgaaccttccatcgacggggaatgtgcccgggaatcgccagaatctaagagcgtcgcgctgtgttgtggtagataggacgaagcatatcctgtcacatcctgaaacgatgagagaatgaagaacaaaactgatctgaaaactcggaacaaactattgtacccctgaaatggaagagaacatacgtgtgtatgtaagatcggaattaatactataccctctctatgtatagcacctgctatgacctcgaattcgagttccacgaatcttcgctcgagcttccatatcttgaatccaagaagccgaggtgagaatgcatccgcccaatgatcaagaaccaatgttcgtcgagtaaaagaatcgagctcattgtcgacggcgcggcgagatagattgaggagggggcgacatgaaaatactcaagccacgccactagacgtggtctgacgctttcgttcttccgtttgttggatgagttcttgcgtcttcacctccagaggattccctccaccccagacggcgagtgagacaactatcgcatcttcgaggagtggacttcgttgaacccactcattgaattgtcatcaaaatccacacatgcacgctgcgtgtgttccgatcgcatgaagtactcgcagcatgaagaacctcgcgttcaggacgccttcggcagagagagcccagtgtgtgcgcgggaagtcattcgacttctttcatactatgaatttcgagttacggagactctcaaacggcatcgagctgctcagcgccggccaactagccgagttctcaccggcgcggaggagggaggttttggtggtgacaccacactcccgggttgactgaccgttgggttctatccccggggtccgaagggatttcctccaactctcgacgatgaaaagaaatctgagcggtctgcttcccatttgcagattctcgtgtgaatcactgtcaggaaccgctctgtagcatcggaggtcgtgtgctcaattgacgggcatacgaaaccagaggccgacttccagacgctacttccgccgctcaggcctgggacatgcaaggtcaagctgacataaaaccggatggaacactcgagctcgatatgcttgaggttttgagctgtacatcacattcccactggttgaacacgatcggaatcctccgggtctggtttcgtgttcatctatggaagcttgaccttccaaagtcaggaatcgctaagagcacccattccgatcagattttctccctcacggcgtggaacaagccgtctggaagctctcgactgcgccacaacagccgatcctggcctgaagtgactctcgtttttcagctctggatatattaggtggacggcagaagagcttcggacgagagagtttctctggcggtgtgggtctgtgcagcgagtaagcaacgcggggccaactcggaccggtgtataccctggatgccgaaaaatcgagccagtaatacatgaagctgaaaactcgagcccgaaaagcatgaggccgaaaggcatgaagttgaagagcgtgaagccgaaaacctcctctcccaacagcggagcggttgggactggcttagcggggaggaattgcaccttcgttatgctcagcctacccacttcttctgcctcgcttccgtcctcgctgttccgcatctacggtccctagttcgaactgagcaaaggtgtagctgctacaggaagcaatctgctgagcgcgaatattgaagtatccgaggtcaactcgctagaactgaagaggaatcttcacctccagctccagtactattcgcagaatacgctgttacaacaccttgttctttcccaccgaagnnnnnnnnnnnnnnnnnnnnnnnnnnnnnnnnnnnnnnnnnnnnnnnnnnnnnnnnnngaaaccggcatcggaacactgattcttcgcagcaggtgcgtgtcatccaaatgagtctcacaaaggtacagatcgacgaaacgatacagaaatcccatcccgccaaaccagtcccnnnnnnnnnnnnnnnnnnnnnnnnnnnnnnnnnnnnnnnnnnnnnnnnnnnnnnnnnnnnnnnnnnnnnnnnnnnnnnnnnnntcggaccacgttgttctccgttccggagaattccatcgaagcagcgatacacatgcaggaatgttctaagcgatgcttgtcttgtcctgaatttctgtcgatgagagggaacagggagcaaggaagttcatggagccgttacttttcttcgctcctctggcagtcctgcgaactggtttcacggcagtgctgagctgttcgcactcgaccaacagtcgacacatatactgggaggcgtggagtaaatctgaatccgctgtgaccatcgcttcaggggaagtagatcgctccagatgatgaaacactccggatcgtagcacccacccgccgcttcccgaatgagaggatggactgaaggtccgcgcttgacgccgatcccggatcaggaggattgtcgcaatccttaggagaaatatcgcttccggagaggcaaactcgaaagagatccacggaacgccggaggagtctgacccgatatctgaaacatccaggagcgtcctcggaaatttccccctgactcatcctcgactacattcggatgcatgcgattccgaattctccagcgccaatgcctgcggcccctctgatcgattacagacggcaaattaagaagaatctccatccaaccatctgaatcggcgttcattggttttgatcacgtcgacggcgtcttatcggaatcagagacctgctaattcctcatcgtaagaaaaattgtcgagcagaagaggtcagcctcgccagagggaaactgaaaaaaatatggaatctgattccgaaatgactctcctgaagagtgttttaattcaacagtttcatctcagagcatggagcgcatcgaccggaacaccgaatagcatcattctgagagggttcaggtgaactccgggagagtcaatcgagtctcatgttgtaggtatttgaatgagctggcatttatttatggagtcgaaattctcgacacctcagtccgtgtgctggagcggctggaaagaagatcgattttcccatttttcgcccggatatgagtgcttaccttcgacgatgctgctagcttccagatcagtggaatcgccatcgtgaaaaaacatacgatcgtggttgtatcgatccgctccatgatccaatgcccgaaccacgcccgtcaagatggatttttgatgaaagtcgctgaaactaccgttgctccgccatacatctacagagcagtgagatttccttcactatgcgctcggcaacgggtggtctcggctcggcctccagggagtttgaggtcttcggaagcttgcactgagcgatcgcaggtttcgaacattcgaagctgagagaaaaagcaccttagattgtacccaattacatcaggcgttgccttcccctgggatggcgtcgcatgtttgctcccggttcgaacaggagcacgcttgcctcatccatttcctgcctgagattcgggtcgctcgtcatgagccagtcgttcaagttcattttggaaaatgagggttgcttgtctcgtgattcgttccgttctcgcaatagcgcgccttgcagcttgccggctggacgctagcgtttctcccgcaggtgaaacccgcaaatatattgagggactcgcgggttcgtgtcgcggtctgggaccgcgaggagctctgccaacgacggcagacgatccatgaacattgttaatctgagccatccccgttgaatatccgcagtcggcctcaatgggatcaccgaagctcacctcgaacagagagaatacgctgctctctcgagttccgtggagtgagaaaaaatattatcctctgccctgtctgggaacgcggccaacgatgcgcgctgattcaaacaatggccagggaggagacttcattggtgagtcaaattagagtcgcatcggacaatctgagcagttttatcttcccgagtgcttccgatgtcccagagttcaaagaaccactgccctcgacacacgcgcaggactgtgtctgttcaaagtcactctttcggaattgttctcgggaccttttgtctgcgggtactgcgcctccatccgaggcttgggctgttgttgctatcattgttgttgttgtggctgctgctcgctccgcgctcgatgttctcttcgtcgtcgtcgttgttgtttctctcgttctcggtgctggtggcgaggccgatggcggcgcggcaaccgcggagatttttggtttcgcttcatccgcgagaaaaatcgtcgcatttcgctccgaatggatgggatgggacgcagctttcggggagtctttcctcgcaaatgctccgagccgaatgcaatgaaactatggagccacccgggaaaaacggcatcaccattcttcatagccaccctccgatgttttccagtctctcgcacaagtatacgagctctgtatgtgatgattcatgcgatgcaatgagattcctctctactctcgaatcatgtcatcgataaagcgaacggatgagaagctcatcgcttcactcaccaccctgccgaggatgaactgtcggcctccatgacggccctcgacgggttatatgaagtttccaggctctgggtcgtgtacgatacagctggttcgtcatgtcgcgcctctcatgctgtgaagcaagacctggtaaggttgccaaccgaatcgacatgggcaaaatcattgctcattggagaaagctgcttggttgattctttcgctctcctagttcgatcggggtagttcgaccacgaatccttgctctccctcgtaacggctgctgagagctgaagtgaagaagactcctcgtttggtgatgttgggacaagaaggaaacggagtcgcggtggaactccactaggctgaacaaagtgtcgccgttcggctcgctcgcagaatcacgaaacaggctcgatggggcgcaccaaccatgtgatcactgttcaatgcatcgtagagccaacctacttctttgtttctttttttttccggctgaacctctcagccagccctcagaagtgtcctgggatcacctttcggtattgcttcagtaacactccctatcgcctcgcaaatcccatagcgnnnnnnnnnnnnnnnnnnnnnnnnnnnnnnnnnnggcggtgggcttgggtcttaagatggttcagatttaattctgatacaaattaaatcctctttttaccacagagccaacctcctagaagcaaacaatgggctcagatccggagcgtctgaacgcgcgaaatacgtttcagattcctccggagctgtgaaggatatcgggaacgtgtgtgagaagatgactctccgttgagcttcgacgaccaaggaaatgtcgaggtttcatcctgagcaactccggaaagtgtgcaaggtattcgtggactcaaggattccactgaagttcaattcctgctcaattccgtcgagtgattccctcggaagctttgcattcccttccttcagtttggtgaaggagcgtctgatcctgtttcgtgacttgttcgagaggaggaagcgttttattatatttcaggcgcatttgcgtgaagcgtaggcagagtaagccggggaatcgaatgagaacttcgagattcctggaatcggaacggagaaacagaacgaatcggagagcaaacaatttccgcaaagagcaaatcccactgacgggagtctcctgatcccattcggctgaatgatcccagggaaccttccagaccaggtccagcactgtcttcccggaatcgcgttccaggtcctcgcatcgctttcgaactcttgcatgtctctcgatcccgagctatgctcctcgaaggctctgagaacgtgttgagaccgcaagctcagtcggtttccgactcttgaagtgtcccatcttgccgggaggaagtaagagctcaaccgagcggtgattttggtgcaaacgactaacctccgttcgagcagcctgttgcacgaacgactcgtgttaccaactcctgtggcctttatttggaacagcgaaagcctaattgctcctgctggttaatgccctacttgacctgaacgcgaggggaagcgtcttgacttcttcgtgtttgcttatctgtgtcaatatatacgcgaggatgaatacctgaacagcacacgtgtgcgtgttcggcctggtaggattaatttgtcgaataatgtcatccatgaacctccgccgaaaattcacgagcgtccaagaatgatgcagttgaaggtcgatcgtttgggtgtgcttgtgagcgtgttcgaaactgcacgtgcacggtacattccaacacgatcgacctgaaatggaaccctttgcgaagcattgaccgagcctcgagaagggttccggattgcccatcccacccctcccccactttccagcacaccattcaattcccttcctccaccgggggtccgtaaggaatgccggctgcattacgcgagcgcgtcaactgaaccacggcgtcccctgccgagcagaccggcagggagcgattttgaagcaggtcgggagactttgtgaggtcaggtcaaagcttgggcgaccgagcgagcggagctaagcgagcagatcgacagccggcttactcgaaatcgtgttgggggactcggcgagactaggttaaggcgcctgtgacccggttgacgccgcggcctagacgacggtaacccctgcaatactgcgaaattgcagcctgggtttcggagctagtgagtacgacgcgcttgcacgacggatgtgttctatctgttctgtgatcgagagagagagtatgtttgtataagtcttcgtttgcaagttctggacttccacacaattggtcggatcggcctcaacccacgggcgtcttccgaggaaggtcacaagaccatggcctcatgcctcgtcactcattattacccccgccttcacgaatagatccgtggaatcacatgctggcaacgcaatcgggatttttttttcacttcatagaggtggaaaatgcatgatgcagagccgcgaccgatgtttcgcgcttgggtactgtgtgactcgcagactcactaaaaaccaacctctttgcctcgacgggtcgtggtatccctagttttaatcgggacttcctgaggtcgccgatttccatgtcgctgtgagtcctccagcttcggtcggttggaaggtacatcaaggtcgagttttaggagcgtagcgcggaataagtcacctaggtcctagttctctgagtgaatcttgagggcgttcatggagcccccccggtgggtctggtcacaagctcggggtcgacccgactaccagccgaaaagttggactctgtttcgggcttcgttgagtgaaagtacaaaaaaaaaacacggaatgattttgaacacagtttctgaatgctctctgggggacacgaagacgattcctccaaggtgcgcccagagccccgtcttcttcgagcgattccatcggcgtacctcccaggtgggagccgcggcggcccgagatgaagaaattcctgaattttccacagttgttatcgtcctgtcagttgagaagcacggctagacagactagtcccctgtatgtcgtcgcccgatccaggaagcgagaatgttggaatccggagtgtgagtccatgaggaaaacagtcgaaaatcttcaaccggatattggaccggagtctccggggctgcttgtccttcattggtgtgttcgcaagcctcgtacttcgtttactttgactcgttcccgctcgagctggctgcctctcgaatatgggttcaagttggggtgcagaagtgagtgaggaacgacgtgcgcgttttgcagaatgaacgtcgtctcctcaaactgcagcaaattgcacagttctcctgcaatgtcactctcagctgtgcgctgcctgcgcgtcggccctctcggccgggaggctccccccagcgctagtttacttgcgcggggcttttctttatctctcgatctttatggctgtccgctgtctgcgcgagagaatggagacgcgaactggtaatgacggaggataagtggggaatacgcaaatgcactcggaaattcaacccgagcctccaagcgccatctcgcccaggacgcaaagttttcataagggaactttcacgatcggtctgcgctccgggtccgaatcacgacgcaggaggaatctattcgtcgggagctctcagcagattgagttgtgccgactgctttgaaatgtgaatttcctgcagcagccatctggcggcctcggcgcttcatctgattttgactgggttctcagaatagggaaatgcccgaatccaggccgctggtttgtgtcgtagattcccgcagtctcatcgatctctagcttccgtgagtcctaaaacatgcagtggtgaacccgagctcatctgttgactgttggaactcggggatgtcgctcctgggctccatcggtcacgccggtgtcgccacggctcgaagtcctgttctgtagcggcgatctccgtgatctcgatgcacggggcactcgggtgacacgagtcgtgtctgataatgctgcggaatcgggagggaggtcaaagtatttctcccggcgctgacgctcattatttgccacaactccggatctcatctgaatcgtggctaaatagcgcatctcagccttcgttggagcttcatacccggagaaagaactctagggagcacatcagcggtcattctcgcaatggcatgaccactgaggcctttcccgggtttcggttagtgaatccttccggtgggctggtgaacacagtgcgactgagaatgtgctcttttggaaccagctctccgctcgccaatttcccgcttgcacgaggcccctcgctagccgaagttccgggatgacccacaggcgcttccgaacgatctttccaggaaggcctcagccggagtccattaacggaggcatgcttcgtacgcgggtcagctcgatagccaccctacagccaaggccaactctggaagttttcagtcggaagggtcgacatagctcatatcccagacgcagaccaacttcatgcttgtgtaggaacgcttcagtttcctcgacggagccagcgagcgccgaaattggaacgaacggatcccgagagttttccatcatggtcatgtcgggacaaaacaggaatatgtagcctcctgtgatgctcttggcttccttccgaataaagttcagttcctcgaaatcatccggcctagttggtgtgcaactctgtatcatacatggttcccgatcgaaggttttggacacgtagctccggcacaaaccgtcacgccggcattgtatggattcctaatgaatcccgcgatcattcatgtcgagcctcgggagtcgtagctgactaaacgaacgcgagcacgacatatcgccaggagctgagcgaccgttgcgcaatcgaagatcacgtatcaagccagtgtatccctccatgactacagcctgactgcgacgcagccatgtctttagtgatgggagacaggtcgagttcggatcggagccatcagaatagctatcgcgaacaaaattcgctcgacagtatttgattctgaacccgctcctagaaaccttgttgtgccaatgagggagcccctgatcgcgtcttcagcagtaacggagaaggcgtagcgctggcacggcttgcggtaggttcaccaagcgaggttcgagagtgcaaatgtgcgtcagctgatgagacactggaagatgtatactcgaagggcaaacaacggaccggtgaagcaatggataccgctggtccgggcccactgtccgaagtcgaccagaagctcccgcgatcggggattgtatcaacaggaaacgtgtgttacacagaatgctgccagcactcgtgccaatctcaaacagcatttccgaggactacaagcatcgtccagtggcgcagccagagtgggctgagcaggctccccctcccctcttcaatcttctgagctcgcattattgaagtcgagctttcgaagcggcctctcaaaacccagcaagtcgctcatcaggaactcatcgcagtgtctctcccactccagaaccagaatgaagagaccgcaggatgcctcccaatttttcgagaaaaggggaggaacctccaccgaagccggttccgtgcgcagagctgcctcagctcagagcagcccattcgaagattcatcgcgtagtaaagagccggaggttatcaatcttcctctcgacacgggtcgattcgtgaagactgacgaaactgtacagctgtccgttctctctgagaagggggtacgtgaagttgtgacaagaagaacgcgctgtgggatgagagctacagtctctggagtctgattcaaacgggacagacgggtgcttcccatctcacttacgcaggaaggggcgcgttctggcacttttgtgccattctcgcccgatgtgagtcagccgggcacatggaaaacagaagttctttggtgctctcgtgacgaagccatatctcgagtacgaaaatgctgcagaggcttccgagagtcacgagaagaagctgtatcacaaagacgcagaagtcgattcctggaatttcatcaagtgctatgcgcacagagatttaccagataccagaagtcgattcaaccacggacgctgcaagcatcgaggaacagatcgcgattgatgccaacaataaacttgatgaatggatttgataaaaacaattctattctgcggacagcggaaccttaagctgcgcggtcatgacgaaagcggcaacgtgctgcgttttcgatcggaggctggtgggtcaaatgacggctatttccgcgccttgctccggttccaagtcgacgctgacgagagtggtttggaggagcatctatcgggcggtccaagaaacgccctctacacgagttctcagttgcaggattggatcgttgaggcagtcgggaaatctatcaggaagaggattgttactgaagttcacgctccgtatttcccctgtgcaagtcattgcctcaatctcgccctctcaagctcagcggggcaatcgaatatctggcaaacgacaggcaacgtcgcgagcttgtgctagtttattagtagttcatcacgacgcgtcaaactcctgggagacgcagtggaatccagccaacccctatgcgccacgtgttggcttgaaacccacagagctcaactggttaaccgaagatacatcacatccgaagagctcttggttcctaatatcagcagtttgtatgggtcacccaacgagagtccagtgtccgcgtcaatgagctgctatcgagcgtctgtgaactcgagatcgcagtgtccctttacttcatcgaacattttgcttttcactcccttcctacatagattcagctgctctcaaaatatcgagacattttccaggaacgggggttgatcgagagcatttgaacagcactgagatcgatgagagacaatgcggacggataattcagagagctgttctggaaggcgtcgaaagtttgcgctgagctcgacgtcagactctgcgggaggatgactcatcgagagtatcaccccacgatggacgttgaaaagtactctcgtatccctcaatacgggatttatccccgactagcggatggcaggatttggctcacgctttgaatgtcatcgagacagtgcactcaaaccttcatcatgaaatccacgttggcactttcgaactacaccttcgctacagtagaactcattcgatgacacagcaaacggttccctttcttcacgaaaccgactcaagctgtagtggcagcatgtggcatgcggagtatcgacgatgggaagtggagtgggcaaatgtctctcaagacgcaagaccagcgcaatcgatcgataccctgaacacatgttgctgggatagctgcccgaggatcgcactctttctgcggactttcgctacgttacccgtgacgacttcctctgcgaagtgaactcccagccgtgtacgagcgttgaatacatatttgaggtcagtcatgactgggaacagttttggagaagatgaacgagaggttccttcagggtgtgtaaaggcagacagaaaaaaatttgagtcatttctcctcccccacccctgaggaaaaatcctggtcatgcctatgcatccgtcaagtgtcgacgtttcggagtcaccgatcgggagaacctcctccaagacgcggctctccattccctctggaaaacaacaactttgaacggggtacgagagctacctgctctgagctgttcctcggaattcttgaggttgatcggatgaggaatgcgagctaccagcagcgcagcttggtggcgaccgctcttcgcattgaaagtatcgtgcgaggagacaacgattccgccgaccctaaggcatatatacacgtttatgtaggaataaagaggtctgtactggttcgaatcacgaccgactcttaagaacaggctttcacaaactgtgtatgcgatttctccaacggtcgacttcggaaaggcattcgctgccgttgtcaagcagccgccagagatccgcgcagaggatgtagcggaaaaacgaacctctccaacggctcctccccattgaacgttccgatccatcgttcgagatagtcgcacactcggacgaacgggatcgaatgttcatctcgagcgctatctgagcgcttcaagagtgaacttggcggtttcgtattttgcatttcgccgtcgggaggacgagttttctcactcagctcgccagagtacgtctgctatccagaggaatctccactccgaaaccctcgttctatcagccagtaggatgaatgaacggatgactcgggagtcgaaggtcaccgggatagcgtgagtgaaggctgcccgagcacggagccgacacgggaacggcgcctgagaagaaacgttgcagatcactggctgtcagcgttttctctagagaggatgacgccaccgacttgtgttttctcccatccagcgaactttcggaaccgctctcattcgtcttgaatcttctactacttcaatagaggataacctggaaacagcggatcgcggctgagaccagttttggaatcccaactgatcagggtcctcgatcgcgtcttcgccgttgaaaatcaaggccgagttcatctctttgagtccgccgcatcatgttcagaccatcagttctgggctagaccagggaggaaatgcatgactttttcagacgctctcgttagaaagttcctcgtcttaatacggtgtatccttcataattcttccggatggcgcttccgaacggagctctcagaagaggtgagcccacctgaacagagaattcgaagccctgccgcagttatcgggacctatttacgcagaccaaggcgcgttctaagcgtctgcatctacgcaataaaaatgaaaaatctctttcggaaagtttgaagccacgaaacgctgagcaataaaacgccacattaacgaagcattagaaagctatatttgactagcccagcacatccatatattaaatatacgacttagcgtgtgctggtttacgatgagatctaatatgggagtggctgacttcttgtctggctgcttcgaaccacatcgaccgcctcgtattttacgagaggaagtatgttgaagataacagcggagggggagcggcggcagcaggaggagcagcaacaacgaagacgcgatcgagaaggcagggaaactaaagagtcctttaaggattgggttcgctcaatcgcgagttttacagagatttacggcaacaacctctgctgccgttcccctttccatttgatttttctcctgttcgaacgtcaggagttcagtaaccgatctaaagatcgattcctcggcctccgacgggccagaggatcccttctcgattcgtccgagtttggttcccctattcccaaatcacgttcgctctagcgacagccagaaagcgaggggagcaaatcatccagagaccgaagaggctcatcactacacgggtctggctcgttctcaatcactcgcaaaccctgtcgcccccttattttcgttgccgaaggttcgcgcgaccgtttcgagacaaatttgtcagatgggcaacttgtgcccaacagaagagctctcagtttgtcatagaaacggaaaggggagtctgttgccgccctgaaaagcagacccagctactccgcacggctgtggggtggaaacaattgggagaattgcatggcgtgcttgccatatggagacagacaagagccaattcgccacaacaaccgtccaccacgcggaacaagttgcggcgaccccaccggagccagaggaccgaccgaaagggaaaatccaagccgacacaagcagggcataccctttcgcctgcacctgctcaacagaggatcgagcccggagcgcttgctgaactcgaactctccacctgtagaccttgttcaccgtcggcacctccaagccgccaagggacgttggcgcgatgcttctccaatttgctgtggagcggagcaatgtgttcaggcgcgggtcgggagctccgactgcgtgtgtgcattggagagatagttcagtagccggattacattcagtccttacacaacctcaccaatgaatccgagttacattgactgagccgatgatcccgattcctgccgaaagttcatcggaggtcatgaatttttacggatggaagaaaaaaacacgcggtggagacagagatacgagcgccgaataattttctccacatgtgcggagctcattcggtaaatagagatctcgttttgaggagatgagatgctatcagaagctttcgctcgttacttgccgcgtccctccccgtgcgtcaggtggttgcttccttacgttaaaattcgaagcgtccggtccaagttcgggatcttggtttgaatttcatcgcgcctgatcgctgtctccacgtaaatgagttgttgacgtattccccgatgacccttgccgatactcgtatgtaagaattgggaaccgaggacgataattttcaaaaacaccgcagttagctgacctgagacccgtcagaggaatcgagggattcggaacggactccctcctcgttacgcgtcattaacacgagcctggagaacattcaatcattcctcccacctcgcacatgtaatccgactctggtgcgacacaactcggcaacatctcggcctcagacgagtttcgatttcgaaaatcgacttccagatgcacagacacctctcacccaggcgacgctaacacggagctgccacgaattttgctgttgtcgactattcggctctgcggcgactggttactccgatcgactaacgctatcggttctcaatgattcctcgcctgaccgaggactgatcgtaagcatctgtgggatcaggtcacgaacagttgcttcacagtctggcccaccttgtagctcgggagacgaagagatgttcctggcggtgctaatggtgttccgggggctttccgttcacagccgctcgtcgttgtttagctttccaagagcaatacttctgtacgaacgaccacagtaaaagcctactagggccttcatattgtacgccatcgacgcgccggaagtccaccgcgttatcacagtggcccttaatgcgcgaaccatctggtccccgccgccgctgccatcttctgaagactttgatgatctttcggagatcctaaagtcgacattagcggcggcacccttcctctcagagctcttcaatctacctcgagcccacgcttcctcgagcttccacgttctatatttcaacattttgccaaaattacgttacgcaggacgcgacccggccctgctcagagtcgtagtgaaccctggccgggaaatagcgtctaatggatagacaatggcatcacaaatgatggacacagttgtcatttacacttggcggaatgaatcggtcctttcacgcatggcagcaggctgaactttgggcggttcgaaacgagtttttgcgcgctttcgaccgctgacactcgtattcaaatgatatccgactcggggatttcaggttgaagtctcaaatccaatacgaaaatcctggacaccctcggaaagccctccatcggactccgtggagggaacccttgcagcgaagacgatttcgttcttccctgttagtattctcctgagtgaatctgcaagtgttgcgatcatctcgaaactgtgcgccagagagagcgttacaatgatcgtgtcgtggaaggaaagttcaacgcatcgaaactccgggttattaaaccggttcaggtcggcttcgctggtgcgggctcaaacggatgcctgggtcgatggacggagggccaacgagacttatgatactcgaacgtgccccttggacagttgcgacagaagaactagattaactgaatatcacattatcacgttcgccagccagtactcattgtgggcaaagcggaaactattcagctgagagaacgctgcccacgcgatcaatctcatcaagttgacgttccgccatggtccggcttcctcttcccggtgtcaatattctcgttaacatatcctcacgctacccgagcaaaaacacatcgttcaccccgaggtgacgccggaatttctccacgattgtttcaccgaatcacgtcattggcgaatagagcgattcgacatcattactggtggacccgggtccgtttgtcgactctcgctccgctgcgacccttgcgaaacatctctgagcagacagaacagctgagccgtggcttcgaactggacatacttcgcttgtcaagtggcgaagccttccctcccgcgttttccgatccttgccgcactcttcgccacagctggcgatggaaatagattcaccagaagctccaggaaaaactcaccggaagcagcgtgcagccgatttcccgaagcgctgtggctgaatccatgatcccatccaggtcgaggcgatgatctcccctttggtctctgtagcgtgcgttcctctcactgcaaccactcgtcaacctgccatacggctattacgatcctggcaagcacagatcagtgtcaacacactttgtcacggacgctcttgacaccacaggcggctcgacaaatctgaccgccgagcgaatgggatccccacgagtggtaacaaattatgttgaccaacagctgttgcccaacacctgtttcacagggtgggaaaagctgctgatcgcacgggacattcccccacggacgctagacacgattaggagagcagtctgaacaacggacacggacctcgactctaatcattcactcatcgtcgaaagagaaatggactagatcgaatgggttgagtatttgcctctaatttgagtatgcatgtggtgcgtgccctgttctgttgagcatccatataattgaattgatcgtctcgaacattgaaacgcgtgttctgacttgacagagcaggagagtagtaatggtcgagcgtgacccgaatcggttgcctctcaaggcttcaagctaatccatccagtccgtgatgatcactcgttagcccgaatattcgatgaattcggttctcgctcgtcccttccaagaacgactcgagaatttattcatccgccgccaggatcaaaaaacgagagcgctcgtctattccttcgccctgaggatgactttcctgagggaatccgatatgaatcgacagttggtcgagcgagtcagtcgcacccgtttctattcctctcctacgctcctgtccggcggtagggatcgagctcaccgctcgcaccctgaccgcctgtcgggaccgcgtcggagttagtgccgccgccacgctgcactcgtggtggagacagcgttcgagattcgaaacaaacctcttgtcccaactccccggataacaagtcattgatgccctcgagtttgaatccggaacggaaacgttcgtccgattggccaatggcggcatttcgcatgcagctaccattcaatcggaggcctcattgaaaagctgaattcccctcggagccctcgccctccacagcggcccaagtttatctggtgtgaagaatgtctcgagatgtactccgggccacgaaagccccaaggagcaccgccctaacgtttcttcaaaagccgacgtttcaaggagtgagaacacaagcggagaggcggaggagcgaggcccggacaggcatccgtcaagactgtctgttgcacccatcaccgctgatatcgagtcgtcccgtatactgcacggcgactcactccatcggatctgagactgaagtgaaaggaactttcagttgtgaggagtcagttgtctctcgcaggggaaactggatatcttccttggtatgatccgcacgtcgagcatcgatccagacagaaaattgtgagattacgcgacgaggaacagcatcaaatttcttgagccttttcctgaggccaattgtggcctgaggcgcaagcctccctcaagaacaacatactccctaaacgatgagatcatacattacctgcaatggggtcacaaagtgtgcctttctcctccatgagactcgcctcgagctgggactgaaccagccgctcctgacgtaatcctggaaggtttgtggagacaaaggatgtcgtcctccgtccgtcccctgagcccacactcagctttggctgatccgagctcgctgtcagatgaaccagaattgtgttcttctggaaaatattcaaagaggattcggatcttgattaatggtttcgagaactgccgcgacttccaaatcataccccgactctcccccaccgtaatcgtaacttagaatcattgttcgtggtcttctcacgaagcatgagacagggagacgcagagagggtcgcttcggctcttcttccgaatccgaggtctcatcgagtgtttttactcctgcaacatctcatcacggggcgcattgcacccgaccgtccattcgaggatcagtctagctccttgaacccggtgaattcctggaaattgatggtgatacttcgtcatgcagcttcaaggctctcttgtgccctacatttccgtacttaactcccgtctcccgttcgtgaaatctcggccgaagatacagaaactatccttccagtcaacatcgtctcgacgcggagatgatgacgggaacttggatgttaaccgtcagggcttcgattggggatgtctatcggcttctcgctctgccttcagctattttcagtctgcctgcctttgttcgagtggagcctcgtcgggggcgacgtgcggtgttgtgtcgtgtggtattatatattctcgctttttgttccaccaccctacaatggtcttatgacaatattccttctcctccggtgtcacgtgttggagaaaactagagaggatccacaggattggcggatattcgcaggaaattcgaattcatgagaagccctcaacgagcagcgtgcgacacagattccagccatttctgccgcggatggccattgtttggaatgccacagcgcaactgaagtgtctccccttgggatctctagaatgagattgaacaatatccgaatcgggctcgtttgtcgcagaaacatgtgctactcgcgacaacggcagggcttcgtctataactaccgccgagagacacgagcgcacacctgaatgagaggacaagcaacggaaacgaggcgagctttgtcagttcctgtttgtttagccagatggcaatcaaggcttcctgctcagtcgagtgcaataaggcaaatagcgctcacaaactgtcaaggaggctagctcggattctagccgtgacgcgctcgcccgcgcgcccaaccagtcagttagtcagccaggggacacacaacctggcaagctgacaagcgatccgtacaacactgtcacgttgtacgcggctggatttgctgcagccgagccgggcccgagtcgaggccaatccgagggccgtcgtcggacacaatccgagccggtacctcgtgtgagccttgagaccacgggccggacgtactcgaggcggtgggtcgagcgggcagactcacttcgcataaaaacgcactcgtgacttattccgtgcatagcagacgcttcgcgcagatctgagaggctggtttccttggcgagtatacgagcagcattttcatctacggctccgtcgctaattaacgccgtctaatgtggattcattgctccagcaacagctgtaacagcagctgcagccaaactgaccggcaagccgcaggtgactgcagcggccttctctcaggtcgtaatcattgagccgtgcggagccaacgggcggctttcctacagtcggacgtgccgctgcacttcttgcctctgcccgttgctcctgctgctggtggcggaggagctcctcctgggacgcaagcgaaactccccagagttccatcgattccttgatgaatggtacacaacggtcggagaacgcctgccccacacttccagctggaaggaccaaatcagccgggaagacagaggaaagcaaggattgtcattcgacttcatatcgaacgatccctccgcacggcggaagctccagtctggacccatctcagagctcgaggaacccttcgatcctgtcctcggatggtggatccctggggataaactggaactggaagaaaattcaaccttcgaacaggactctcctgaagtcggaatccgttccaccagaacaaattgtcaaattggacagaaagcaccgtcgcggcaaatatgcatctcccgatatcccactcctgcagaccgagccaacgaatgatgggttgacattgaaaattgcgtcatgtttctcaattcaggagaagtgcgcaattctgttggacggagtcgaatgccgcgatgagtcagcttacgtttgaagtacccgaggccatatcgggtgacccttcgaggatcattcgacttcccacgagcggcatcgatccgctggcgcgtcactttccaccgatgatgtgacgccagggagcgggatggcgttttccaggcaaagcgtctccttggcagagcccgcctcacggcgtcctggtgtgggattgagcgcttcgctttccggaagattagctgcacccgaccgagctctcggctctcaatactacgcctgctatcgcccccggttccattgccacgattctcctcccctcaccccagcctcctcccgccgcttttccacacccttagcctatcgcacatttccaccgcatggcttccctggagcgtgccactgccttccattagggcgtcgattgcccggaggcgaacgcacgcgcgatttgactcgggaatgttgctctcatcattccgtggagctctccattcccacgagtgtttcgtacctggctcccactgtttatataggtgcgacggaaaacttgaccgacattcacacacgaaggctcagttcgagaaaccgctgaccatctggtagaatatcgaatactgtgcgcgcggactctttccggttcagtcaccggaagctctccggtgactcgtgtcgggtacgggcagctcggaaattagggctggaaagctaacaagtacaaaaaggcgaacgaagctgttccggcgctcgcttcggatgtccattcccacgagagtcgtaactcgtttggaaaagaccacgtcctccgtatgtatgcacatttcatgcggtcattgcctttgagatgaacgttcggatgaaagttcacacgccagccactcgagccggctgctcgtcggaaagcggaaggctctccttcgagcctttcaacgttttcgggtcgacggcactctcaccgaagttcgcaatgtccttggacacaccagggaaagaaaactgaatatttatccgggtaggcgtttttcgcagtcctactactctcgtttttttcggactaatcggtcaagccgagtattccggcgcccccgtatcgatcaggttccgatcgagaaccgtgtgccatcgttcggacaggggaacgcttcattgagagtcagatgttcccataactcgccctggcgagcactctcgtaccggctctgcgttagcaaaagtctccatgctcctgtaacatttctttgaggcagtttcgagccactcgagatatttaatcgaagtgaacgctgatcagccctggcgatccagggtctgcccgtgctcggtcgcggagtcaattacctttcgacggaggaagctaagaaacgttcctcgttaccttaacgggaaattcaatctcgttcagggacggctcggacgtttccggagttcataaacgctttgctgcgaccgccgcgatgtggggtttacgaaccggggatcgatcttgggaattccttagcagccgaggcgatcgttgccgaagtttgtgttttgttgtcgactctcatgaatcgccgacagaacttgagaatctcgtcccgggacgaatttgctgtggtcgtccgttcttcagcggaatcgtcccgttccatggattgaaacgacttcgattcgacggtacgtgctacaggcaaccggaggaacgagcgataacaccatcaaaattttcagctcgtttcgtggtacttctcgaaaaacggaaaatccctctccccttccgcgctcagaaaatattgtggaaacatttttaatcactggagatattttggaactgtcgactcctacagtaaaagctcgattttgggacgctcacaacccgaccgtatttcgagtccgttgagaggtatccagctggaagttcttgaaaaattgctgctcggccgaaagatactttccagcaaaggttctcccgcgatggatattctccgaaatcggagcgtatttcgagcacgatgatgaggacaatcgaggatttcgcaacgaagaaagaaaccggagcttccgcgggttttcctcccgcaagagattcgtcgttcaagtcgcaaactcatgcgcgatagctgtacccgcgctctcattggggaaacgtttgcgatcctgctcagacacccttagtgcgctggaataatggaacagatttcgaggagcaggcttggtgttggcataagaaaccgcaaattcagctttgggtcggtgcttcgagctcaccgttgatatatgaacgtatttattcatcctccgcattacttccgtaggtatttcctattccatccatctcttcaacctgctccacagtccgtcgctcccgctgagaaagacccgagcgctgcttctcacgagagagtggagaaggcgagagttttttgaagagattttctctcacttccggcagctttgcgttgccggctctagtgcgtgttactgagactcgctgacggtcagcacacacgtcgtctgacgaacagccgtttcgagctccctcgtagaggttagagcggagggaaagtgaatccgatcgaaaatcatccacgatcagccatgtgacaaacgagcttgtcaaaccttgcctcctatagagctgtcagtcacgaatgagttggacacctaggagtccattggagaattcgcagctctcgtggcgagggaaatcacgattcaaggagaggcaatcaattcgctggtatattatccagttgctcacatctcaattagctcgagcgagttgtcttcatttctactagggtctcgtcggcgaactcgatgccaggtgattagttctgggcatttcagataatccgagaaatcagtcaggccgcgtcaaacgcagtccttttcttgaacctcaagagaaaaaggggggggggggggggggggnnnnnnnnnnnnnnnnnnnnnnnnnnnnnnnnnnnnnnnnnnnnnnnnnnnnnnnnnnnnnnnnnnnnnnnnnnnnnnnnnaatcgacagggttagggcggcgatggtgggaacatctgagaatttcaaactcgaagtcacgactgacggaagccagtgatttcgaaggtttgttggtgagctgtacgtttggatttgttcctccccgcttagtcaggtggacgtgcgccgaacactaaacaacgtcggccgctccagtggccgtttctgcggatacgtctgaacggtttacaactgccagagaaacttcgcgtaagtgtcgaacattcgatatcgaaggagtcgaccataaatagcaatagaatccgtcgacccaagattgtagcgaaccttttccttcgacctcccgctttctggaatcgagagcgcagaggagggatctgcgaacaaggctcgagagctgaggcagagccaaacatcgtgaccaagtttctgtgaagataaactgcgtttcggtcgatggagagcaacctccaggatcccagaacgccctgactctgattcactacgaactgcatggtattgagaataagtatgccatggcaggcgaacggtactccggaacatccgagggagcggtctcggaagttgcgcgaggaatcagttgcagctctccggaggttgacacaggcaagttgttgggtcgacacgttgcttgcttgtcgatgatcgaagcgaaacttcaggaaacaggtgggtgaacgagtgctgctctgacgcgggtttcacgtttcgaactcgcgtccgcgttgaactccaactctgacgtgcactgacatggctctttccaaagtggtttgcgtagctgagggcttaagccgacacaattccgcaacaactgagagcggaaggcgtcgaaggtgcgatccgtggaggcgacgaaaactccggggatgtcccgttccttctgatcagttttcgaagatactgacagagagacagcgagaatctaggatacgaagagaacgtgaactcagtatgtgtaagttcacgtcgcggtatgatcacggatgaacgaccgctcagaccgtttcacagtgcgattggtgtgacaatcgttcattttttcattaccgccgctaggtacgtagcttgtagagacgtagcggaaactcaatcacagaaaaagctcttcggcactgcgatctcgatgcccgtccttgcttgagctggtgaaccttagagggtcgcaatttcgagaagtgacatctcaaaatagtcatcatccatccgactctggtcgcgcagggatatcgaggcgacagattgctcagctgtttcacgctcatccaaacaaatatgacaagatgaacggaatccgttccattcatacgatggtatacaactctttctcattcagagaacgtcgtcacccctggctcgattgccatctccgggaactccagcaagccgtgaagttctaagcgaaacttttttcgggttgtggaagaactaacaaaccatgctgaatgccagacgccgaataccctcgacggattcacaagtaggcacgttttgggctcaggatgcgaatcactctcttgcctgttatggaaccacggctggactgggaagagcacgcgggagggggggggggggggcggnnnnnnnnnnnnnnnnnnnnnnnnnnnnnnnnnnnnnnnnnnnnnnnnnnnnnnnnggggatggcaatgacagcaacacacagtctcaggaggatgctcccggtgagacgtgggcgcctagcggaaagatttcggaacgcgaggtcgaagcttgaatgacgttccgctctcgtctaaattcaaatgcgcgacttcacccgcgtgcgtcctcatgtctcctgtcagacgatgcagcgctccacgatgtttacgcagcgcggaaaccttcatcatcgtcgtcgagccgagctgagccctcgctgaatccgtcgtcgcttgcgctcatgccgatgatgctggaactgcatgcggtccgcgtcgaaagtcggcgtaaaactctttctcggaagatagagggcattctttctctgacacgtcgagcggtcagcctcgactcgagggaaaagagtctgccgcagggggaaaacagtagccgaccgcctttgaatcatttctatccacatctgcgtcttttcggcccggtgtttccttttctgagcagagcttgtcaaatgggagcagtcgaagagagttggtcagccatttctcatctcgcgttggcgaacgatttccgaaagtttggactcgatgacaactgcgaatatgagatttcttccagcattctgctgcacacatcaaatatcattcttcccagcgacggatgttcgccctaatctcctggaatgatcgagccaacgcgtgaaggagtgtacttccatgcaaagctgaaaaatcgctctccgtggcagtgctgaaggttcgcgcagtgggctttgcatgagattcaccccaggcctctgaagactaagatggaagcatcgatgatgccggaggatttcgaagccatgagattcccatgcgacaatctcgatcactcaaacagcgtctccgtgctcccagaacttatgatcgacccatgtgggacgctgctgacaggagagaatgatccacggatgagaactggagaacactcggtgatttggcctcgccagtagtgacgcaaacagttcatccctcctgatctgaacaactcatgattccttctctcctgtgtgaggggcgtcgttgctattatgagcacggactgaggagaagcattctcaggtcaaggatgcaggcgcgtcccgctggctcgagcggacgtctcgtaaattctgcgaactgatgaacccgatccgatcaaacgcagacttcggggtcggctgaggactcaagaagctggagtccgtaagagaatgaggagtcggttctgtgtgagataagatgcatttttcgaccttgcgccgcgaggacctccgtctctctcatctattgtaatctagatacatatgttgctttttcaagtcctcgttgcctgggagctccgttgccttggaaaacggttgcaggattcattccgcagacgctctgcacctttctgagaaatcagcaagtacagtaacgaagagagaatctccgaacccttctctggatacccgagtatcagcttacgcaatgatgtgtgcgggttgaagctaatcgcgagttcgatctcgttcagggacacggtactcatctactactacggtactagcgggaactcttctaaataccgtgaagtcaatttgtgttccggatgtgttccagcacaaattatcgtcaaggattacctgcagacgcttttgtcggaccgttgcttcgcaaggtcccgataccgatcggaaaatttctacgattgggctcaaatacatgcatcgagctgacgttaaagctcggatcagttcgagcttcaagggaagccgataggcctgatttggaagcaaaagtcgagaccatgttccgttaaggctgcttgtaggcttgtcggcggtggagcacccctcgagtaaacaccgagaatctggaagagcatgattgcgacacgatgaatgagtgcggtatgggtgagcgtgcgcgtcgaagcgtctgggatattaacgatgtctaacaatccgcctaatagcgtcgtcagtggctctgtcgtcgccgaacacggagttcctcagccgtaggatcgctcaggttgtcccgccgacggcatggctgccgcacgaactgcgaaagcgagaacttcgtccacttcgatgcagcgtgatccgtggtcgctgtgataaacttcgggcaacgaagcaattcgtctcaagacatgcgtttcgtcgaaaccttggggtcacaaatgcagtcaggcagtagcgtgacgaggggacggtgaaggcttcgcttaggcggagtttcgagggggtggccttcttcctaagattccggaggttcgcctcgagcggcaattcgccaagatacgtcacagtagtcaggagtcggggcgagggggcaagggtcccttcaaagattttcgttcggcccgtaaggctccattagaaggagcgtcatcgtctgccgctctcgttctctccaaggatatatcgtcggaaaggccttgcccctcacaaggagatccctggtgcccgcctcagcatcgctaatcctccatgtgcgttcccaagagtgtcctatgcaagttcttccaccgcgctctcttccttgttttccctttttcgcgtggttcgggagtaaatgagctttcttgaacatcatggggtctgatttctcggctgccggaaatcctcatcacgccgacatgacggcttcatgggtggagtcggactcacgcatcgtagcttttcacagatgggggaagatctcggcaaactcgttccctcggattggaagacggcgttgatcgggacgacgaacgatcgtccgtcttccttgctgttgctcatgtgtggggggaacgcggggaaaatcgacagagagtttgggaagttatgagggaaactatacgaatccgactctgagctgggcacttgagcgattcgtgccgtttcgcacgtgaagagtgaattgtgaagaaagatcctgctccaggagccgaggggtatgcttgagcattgcactatgttgattgtcacagcaatatctcgcattggaactgtgtttgagctattgggagtacagtacaacctcgattatttcaactaattgatgcaaaaaaaagttgaaataatcgaaagctgaaataaacgagagatgacaaaatcacccacgttctcggactccgcaacccattcggaaatgagaatccgagttcgaacgctaagcaatgcagaatgatacgagatatattgacgatggaagattctgaaggatggattcatcttcgacataaaaatacgcttccggttgacatccttcggcctgtaccgcagagttgaaataatcgaggttgaaatgcaaaaggtttgaataatcaaagttgaaataatcgaggttgtactgtatttctcggatagtctatgtgagaggaccaagatgattattcctcggtcggagcgatacgcggactccgaaagtgaggaaactgcttctcgagagcaccaaaaaaaaaattctttgagctcttcaaattctcggacggaaactgttcttgatgagagtgctatgctcagagctgaaggtgaaaatcctctcatgagctctgatgcggaataattcacgatcgccttcaatttttcactcgtgtggctgaaagtgctcctggccgagccgaaatcacagagcgctcgagaactccggcgagttactcagggggagaaatattcagcgccgttctgaagctggatgtggacgcgcgaacggtcggatgaaaacctgctgccagcagttgaaaactcctaacgggaccgaaatgtcagtggaagatctgtctatcatggaactgtgttgtagaaaacctaccttattgggggaaactgttggcatgacatagcggggaaaactggagaaatataatcttggaaatctgccgaagttgcaggctcagtttcttggctcagagaccagatttctcctcggtgttcaatctcatccctttggcctgaaccaaggcggagattcctgctactgagtcgcgaatcacaaggacgcctcctgtcgatacgctcagccgtcaggcaacgcttgtgcaatctgaagctgtcctcatttatctctgtggattatccaaggactgttctagagtcgcacagtcttcaacaactcctctccgattgtgagatgagctctcggagttcccctctctttcctcatttgtttctcggtccgagcaatagctccgagcccagcctggactgttctgccatactcagcgtcaggcccctggtggaattccactcttcgacgagaatgtgcgactagccgaccagaggtgaaggtcataggaagtgctgtaaaaaaagactgtgttcttctctcctaccgcgagcatttccgagtccctcgcgagaactgtcgtccatggatcgtgtcgtaatccgagtccaattagaatctcggttccgtctgctgagagacgcacctcgatgattacgtttgccagagaggctataggataacttttctccaatttaatttagttaatctccatccaacctgcctccccagattggctcgtccgagcaggctagcgggattgacgtattacaaggacgaatctggtgacggatcagccattagtcatttatttccgccctttcctcttcaaactttccttcggttctcggcccacagcctctttgcaggttagatgtcattctgtgacgaaaacgactgagggtctgcgttccttgacgtcagatatctcaaaaactagccacgtcccgagtctggaattcagccctcatcaaaccattcgcctgtgagacggtgatatcgaggattctattttttcgcattttctgcaactcattcctccgggacactcttcgacagtggcaggtaggttcagccgttaagagggtaaactaagagcttgcgaatcgagctcagtcattggtccgtgtgtcgttcggcacagtagcgaaaaattgccgtccgatctctacgactcctataggacgttgaacatcattttctgttgacccctttggagaattcgcagcacacccctgctttggtatcgccggtttgcgttgagctctcctactaagctctctgaaacttcgcaccattggaatcgagagctctacggaggttgcgctggcgtggcaaccctcaattcgccctggaacgcgaaaagtttatgatatgctcgcgcgtgggccttatttcggtcacctgggagtcgaaattacacgaggcaacttcgggaaaaaatacagactccctagttcagattcgcctctggactgatatttacaacctctcagcaacgcactagattcggagattggtcaacgcaatgggatcaggatgcccgcaggaccacggactcgacttcagctggaaactctgtactttccattcgttgagtcgctaccgtcgtgacccactcatctctatttccgtacgtgaggttactttcgggattgatattcgagggagacgagcccggcactaatttcgtcaacgacaacacagaactacaaaaatacatcttctaggactgtcttctcagcgtgaacggttcaataaatgttccttattgcctatttcttgcactctcctcttatcccgactatcacttcgatcattcgtttcggagtccgtttccgatgtcaactgcttcctgtatcactttcataggacgagcttcaaggcttatgcacgacgattgttcaacaagcgggagatcctcgaaggtgtgagaatctacaaacccttggacggaattgagaaaggacgctcatttttccaccagtaaagtcgcggcaaagcatgggtttcctcgtcactggcacttccatcaacgattcggagctctccattgtccttgcttcggcgtggccagatggcttccgccaaatcgtgttcggcggcgccctttgtcgatagccgaactgttgcggtagagatgcggactcgtcgtgaccatctccaagaagcgaactcaattcttctacatcgtgcagctcaccgaaaggaacactgacgagcgtcgatggcttcgagaaaacactcctgagtgtaagccgactttccattgtcacctcctgttgatgccaactggacgacgacgggaagacagctcccgagtcccaatctccatcagaacccctgaaaacggagaatccactcgagtcaggtcgttcgaccctctcgtatggatggctgtactcttcaaacggagtcaggcaaagcggtcgggtttggacggatgttcgaaaccgacccatcgcccacccgcctttgcatgtcattgatcgcccgcgataatgaacgaaagaacatccacgcttcttcctcgggaataaacttgatgaagcttctattcaacactgcgttttgaccctcccggctcccaaaaaggctccattgtatgacacaggaatttgaatcgactgttttccgttgcgacagcgacccaaaatcggtgttcatcgaacgggggatggagaaaattcacaagagccccaatccttcggttggaaaagtcgatgattaagctcagaaatagcttttggttgagcaatcgaggtcagcatctgtgtccgagctgccaaatatcattgttcgaatgggttcaccgactcggacgataattcctcccgtgtgtgcctcaactgtatattggatgacaagaatatgcgcgcggaagatctaaggtatcctcggggcatcctccagcaccgcatcgggggattggtcagctcaagctgggcccactgctcgtttcacaacccagcacgcagccgaggcacacggggtcttggtttggccaccatgcaggcaatagagcagtcctggagtgcagacaccccgaatgctccatcaccccaccgcttccgtcctgtatttgccgataggcaactttcgtcggaggattcaggctcgggagagctcctttcggctcactcccgtgttttccatttggtctctttctctcactccggccatcccagcagagagaagctctcccggagcagaagccaccgaggaggagattgttgaagcctcgacgggatttcagatatcccttgctggacgagggtggcatcatttcttgatttatggagcgattgagtgccttttgaacgctcgctcgaacgctgagcccgaacgaatataaaagaggaggaaataaagagaaacgaaaactcgtaagacatctgtactcggagagaatatcgattgaggtctcgagtctttctcgtttcgcttcggattccgtcacaggatcgcgtggaaagcctcgaccagataaatgaccatggatccgattcccatgagtaagccgagcaacatgattgggggagcagtccgggatggaaaactctcatttttgggattcaacacactttggaacaagaaatcgaattcactcggtcggacgcacgaggggagttcaagacgaagcacgatgctccaataaattttgctcgaccccccttgaagcacgcgagctagcgatgggaagtgttttcacagacagatttccgggatttcgcccaatcaagaagggaaaatcccccaaacttataaatagtggcgttgctctcgagactacctgcaaattcatggggaaacggagcgcgcctgattcgtcgttcctcatctactgccgagattccgagtcaaaaattattttggaagctgaagggccgcaaggaaattcaggtttcctgcatgacgatcgagcgcacggatgagtttaccccatctaatcactggacagctcgatcgaatcacgccgaatatcagccatcgtcaggcgtgtgttaagtgaactggtcctccgaatgagctcgatacttgtctctgtgatttcaccggatctcctgggtcgtatcttgaccaaggttccggaacgctatccggcatcgttgtatatttactctccggcagctcccgatagttcgctcgactatccggaatggccattgaatcttctagatgtataatgaacggtccctggcgccgaacccgcgcaaatagaacattttccattcgacatgaatcataggttctcaaaacttcatcggactgtacaggacttccatgatatgcctcgcttgtgcagcgaactagaacgagttacgtgttccgtgaaccgagttccttagaaatttacgtagccgcagccaatggtgcggaaacagagttctcataatgcttcctgttgcttataaatatccgagttgtccgagcggcttcgttcgacttcagaagggagaatattccgtttggtggcgttagccagctatggtttgtgttcgcaaatgcgtaatcgttggacgcaaatattctatcgaacgaatcgatggaaaaccaagcgtaacaagaggaaaggacccgttttgcgaggcgggaagtagaaaaaatcggaaggtgattgggtgcttccctccaaaaggtccggaaaactggtcacaaatggtggagataccctgctttgcttgcgtcatcgaacatcgttctattccgacgacgcgtgaattaaacggcgattcatcacggtgtatcgatggagacagaatcagcaagcgaagactcatccggtgttccgggaatcgtgatagagtgacccatacatgaagatatcgatcggcgttcgatgaaaattgaaaatacgtagaccgcgataacagtgacttctctcctgtgcatccccgtctccccctccagaaaattggcgataccgcgttagaacgttgacgaggttactcccacccgataccacctcgtgaggtgcatgcccgaaatcccgaatacccggaatcctgaatacccggaatcctgaatacccgaaatcctgacagaaatacccagaatcccgaatactcggaatcccgacaactcctcttccctcaaatagagccttggtcgaattcaacgagacttccatggtcgggattctgggtatgcgggattccgggtgatcgggatttcgaacccacacccctcgtgatggtgcagcgttcccaagtatgaatcaggacgattcaggagacggacagctcagagcggcggttgagtcagaagttaagaagactagccgagtgttcgagccatcaggaatgtggatccaactgtctgccgctattcctggcgggtcgagctcgttgctctgagggatgaatgttcaatacaatgacagaaagaaatcgaagcgtctcgtgcatgatcatgcgcctgaagaccccgaacgacctttcgcgatttcgaagtttcaccgtgtatcgcgacggtgggccttggacgaagacatctcggtatccaagagcccctaagccggctttgctttctctgcacagattcttctcagggccgggtgcttctgtctgattccgttccctgaggtgtcccgccgtactctgcatattcatattccaatcactctgcacctaatattgccggcacgtgtcctcagcgggaaattcgattccagagaaactcggaatattccacgcggtatcagcagaacgaccgcagaaagacgaggaacctgggtccgaacgaacaatatctctacaccggcctcaaaacgtgatggaccacggtggtggcacttccggatcgtgagctcaaatgtcgagcgctgagcgttccacaacatacgattctcatccgggcaggttatccgtactcgaggagttcgtccgaaagattcgagtccgtgccttcgcttcggaaacatgcgcacgaattcatgcgaacaattttatatgtacgtatgatataaatggagtcgtgcatgtggaacatcccattgcaaactccagcggatcccgttgaaagtttcacgaatcccacaactggaagccgaatccactgcgaagtggatgttaccgggaagagggaacatgacgtctttccttctcgctcgtctggaaaaaaggtcgggcaaacgagcacactcaccgtcggctacatttagagacagcggaagaaaatggtctgtgtcactttcaaaagtgttcgtgtccctcggctgccgacagaatgaacgaacgaataattcacgttcgttccagcttttacgtcaacgacgataaaataaaggcagcgccgcaaataaggcccgcagcactcagaaacgtgcttgttttaaaatgtattcagcgtctgatatgtaaatgaccgaccgagagagacctcccgccatcccgcccgcccgctagcccacccgtttgccagtctggaagactccgacgaacgttcgcaaacattctaggtgtgtcttagccccttttccgctttcttcattcccctcagcgtacgagctcttcgaggttgaggttgagctccgaccacgactcaagtccggcgcctagagtcggcgcttggtctccaaggagggaataggaagccgcagcgatcccgaaggagggatcaggatcctgatgctcattcacgcggagtcactgcagcgactgcccgttcctgtgaaacttgatctgtgccgccgttcaccacaaaaattcagcacggaaggtttataagatcggagacaaggacgaggaggatgaggaacttcgaaatcagcagcattgatcttcgataaagatctcgaggcctcgataattttcgcacccgacgctacatcgttattgctgtctcggagaactcggtggattcatccttgatggtcgttcatggtggaagtaggtcaaacggcggaggcaataccttcacggcatgcggaagcgaaggaaaggatgaaagcttctgctggaggctgctttcgaaactcgaagagagacgtgggaatctcagatcagacagagagtgtgactgtcagactcaaaaagcccgtagccttcctgctgtcgctgtaatatatagcccgggctttagaatgggacctttcgaggagaaaaagtgctctcctcaaggcgaacgacatcattggcctatttgcatagaagatagaagccacgtttgtcctgaggaaaacaggaccatcagaccattctgccaggaccgcagtcctgcaagactgggcattccgttggcttccagaggatagttcgggaactcccccacggatactcagacattggactcacaaacttccaaactccaactaatgtacatcgtaaccttcagctgaagaatcgtaaggagacatggtttcgttcagggggtcgaccggagagcatatcgcctcgagtattctcctcaagagcgagttgcatgtctgatcaataacaatgaaggaagtattcagcgtcggagtccagaacgagacaccatcccctctacggaactatcgttttcgatcatcatcgtttgcaatcatgataagatctcccctcgggggaccacggctgaaaaacgagccgatgcagggcatggatagaatatacaatcctgatttacgattcatgggctttggtaccccgctatcgacaactagcaaagggaattcattgaggaatattcatcatcaccttctctcacgacctccattgaggtcgctataattcatccaacctcaagcacgagagtctcatgcaggcctccacgcaattcgctgagatcttctattgcagtgtcggccagtcgcatcctgcctgtgtcttacagctgtttgcgactcgacgatggactcgaattctgatacctcaacgcccccacccggagtcgatccattgcaaaaagcgaggccgtggaaataattcagttgctctcgaatggaacgggatccaaacctgccattgtcggggttctcggaggcccaccattcgtgaaattcgcctcctgctcaagacgattcgtgaagagtcagcgtacaaataagcgtccgaagttcactccgaagtcttgcagaatagcacaaatcggcgtttcgaaaccgaaaatgcgtgagcactcgctggtgcaaccgttctcggcgctcccgttaacaagggtctgaaccacagcttctcagcattttgctcatacgaagtttaacatagaagagttcccccagagcctcactgatcgactcggggtctatcggattacaagctggaaattcgctttcagcgaacacgctttcacgcatcgatattaacgatatctgacagcccaggaattcgcgtcggggcgcaagcctcggaggcggcagaatcggaacagtattcgatatcgcaggagcgcagtggttcccacgcttttttgacggcggcccctctttgtgtcgcctacgccaccaacgcgaggatgcatcctacaccacaggatgaccgagcccgaattcctcatttccccccgcaccttttagaaccccatgtttccccatgcccagtttcccactcagccaggttccctcccctgtcttcaccgtatagagtttgaaacttggagctgatggggaggttggcaatccacagcagaatgcttggtaagaaagagtttggcgatatgttttcgtgttcgattccgtcgcaatcggtttcgggagggtgggtaggcagcgccaagtctcggcgactctgctgcaatactgacggcgaaacattcgagccgctgcaaaaatctcccacgaagtgtcaggaatcccggagccggctcctgcgaggattcattggatctttgtcgtcactctgcacctgccactggcccgttaccacaaaaaaccaatgccgaggtcgctgcaacggctggagagcatcgctattctccgatggcgacgtatcccatgagtgctgggtcgattttcggacctggagtccggatggcctcggcttagccaccagtcagctgtattcctttgtataaatggatgacgtgaattcatccgtaggtgtgatcggcgatgattcgggaaacgtagacaggcccaaactcaatcgtcgattcagaattgaacggacacagaatcaagagtatcaccttagtaatccagtacaacgtgctgaggatcaagcgacgccgcgggttgggcgcagatctattctgcgatcgtctgggaaacgagcggggccctgtgatctcgctcaaagcctcgtcctaattatttcggctgataaaaccttaagtgacaagattgcgtcactggctgcgatcgactcgctcaagaggagctgttcaatttccacgcaacaaagtccaggctcatttcaagcgcacgccgatcggtcgggagtcgtctttgaagttgaaacgatcgagtgaaatcgagtctctggagctccatatcaaggtgttcgtcgggacgcatccattggccctccttccctgttgtcgagattccggtgggaacgaggcctgaaccagccagacaacaagggaggtgggcgagccgcgcgcgaaacgaaagcaaacgaagcacaaattgagaacaaactggttgagtatacccttcagatatttgcttccctcttagcgcggcggcggcggtgcgtctggcgttcggtaaacaggatgccacacccagtgtgctttcaatctgtcatttgcgcggtgggcgcccacccggttgccggccggcttcgctcgaccgccccgccgtttgcttgctcgctcgcctggtccagtggggtgcgattttccgctattctgatcctctcttcgctgggtgtttggtggtgctgccgctgcgacgattgggacggctgtttttccccactggtaggagaaacgccagggagctgggagaagaggtgggaaatgtccgctggccgccgccgaagagtggcatttgccttttccatatgtgtcctccatctgctccgaggagtccgtggagcagaaacattcattatcttggtgatatatctcccacggtggcgactgccaccgccgcaacaatccgaactgaaaaaggaaactgcttggtaatatgtacttgcaacgtgagcggctaatacgcacagcaccgtaacggaatcagcgagctgcgttcagcatgagaacttgcttcaatgtccatctgacgtgggaaacgttttggacatgactcgcgtgtcctatcgactcggtggcgatcctggattgccagggactggagcggcgggctagatttatcatggttttcactgttagccgaaccacgcggaggaggaagaaaatggaacacagggaagtctgatcccgagctgctgacctgataatcacaagtaccgctacaagagaaccaacaatggaaaggtcaggggggagggggggctctccaatgtcaacaggcatcgattctcttgacaccgccggggacatgaacttttcactgtttgccgcagtcctccgaggacacactggtttctcatgttcgagaaccttagaccgatttgttcaacatcagtagacgagctggccgagaataagaatttcgcgttccgtccttgagtttcatcaacgcggaataagctcacgcggaggactccacttcatttttctcagctccgtagcagcagcgtcaggcattcggggtcgtacttcggaaaacagctccaatatctctgagctcgaggtcgtagaactctacaaatcgaatttggcccattcctgctcgtaacagcgcgagacagatcgtttgtgagcacgtttccgctatgtaactcgagaatgattaatcggttccgtaatggacgagcagcgatctttccgaggtcaacagatctgctgctaaatggcgaggcctgcctaatgtctccgtgactcctcagttcccaaggtctttatatatccgaactgcaacgcgaaacacctcaaggacgatcgaaaatggaagcgacacctcgggagtcgttcctgagagaagatgagcgtctagaaggaaacgagttcaaacttcggaggtgagggagcttctcgttgcagaagaaaacaaaagtcaaagggagagaaacgaccggagacatttgaaaaacggagtgaaagtctgagagagccgtccgaccgacgtgagagctgggatttggctgcgccatgagaacttgcgaagcgatgttgccatccgtctacgggtcgatcgacttccatcgcgaacagtaatatcctgttccagcaagaatcagccggacaatcgaatgagcgatcgctcccggtgcgcgcgaatcaacgcatccttcgaagcattgagtggcccgattcgatcttcggatcgaaggcgccttcatgttcattgcttcccatcgaacaccagctcgatcctgcttgatcccgcgctcgaacaactccggacagctcttgtggaaaccgtcctgggagggatccatcggctcaatgaagattctgagattgggagtcttgagaaatccagacattctcctatacagtacaacctcgattatttcaactgattgttgcaaaaaaaagttgaaatgcaagcgtgcaaggatggagcatcttctcggggcaatcgctctctgggaaagtgatgctccgaatctgaggacactggatttgaactttgcgtctctcgaaatttaggaagaggcattagctcgggtttctctcagataatcgaaagttgaaataaccgagagatgacaaaatcacccacattcttggactccgcaactgattcggggggtgagagtccgagttcgaacgctaaccgatgcagaatgattcgagatatattgacgatgagagattctgaactatggatttatcttccacatagaaatacgcttccgctcgacatccttcggcctgatccgcagagttgaaataatcgaggttgtactgtaccttccagtcaggctccagcgcagttattcaagaatagttcctgttgcttatgagagtgttcgagcgctggccgctgctcacggttgagaatgtccctgagtcgagcagcaggaacgaggaactgatcgaatttgattaaatctcattcgtgcaatatcgactggtttcgttgtgactcactcccgacttcgattccgtagcattcccggtgaatgaccgctcggctttcacacggagccatttctaatcaaatcatcacgctgcggggcaatctccgccttcctcagccagagccacctcaatcctgcaggacattgatggccgatcgtcacgagacacattcgttctattatattttgtctgtcgaatgcacatcgcattgatcagtgctcgagccgcgtttcaacgcaatcgtagttgcagtcagccaggatctgaccattcggaggcacagaagctcacgacgcgaaggctttccccgcatcgctctgagcagagtcgatgccagcatgtaagttgaaggagtgaggaccgattgagaggagttccgatgagtcgggcaaacgaacgcttcggtctgggcggaatactatgaccagccccctctttccttcaacgatccgcatcggactcgttcgatgctccgaaacagcagtttgatctgtgaaatactcctcctgcatcaggtgaggctgattcacgtccagaatggcagcgcgaacgagatcgttgcggaggtttccgctcattgcgccttctcagcaaagctacggagcgacgagtgtttctacgatagaagggaccttgccgccagcggaaccgttctgctgatcgcggatgctctgccggatttcgagtacaaagccctgcagcaaacgtgttacccctcggcgggagtctggtgtctcgtacgggagggtttcagttcggagtcagtcgatttgtcagtttgcgacatttttctcctggcgagagttccacccaacatgaagcacgtgatccgcctgtcgaacggtctcacgattttcacgtggacgccaagtgagaacgtgtgtaacagagctggaatcttttgccgtcaaagcaaagctttcaagtcggacttcaacggactcgttctgcggagaatagaccatcgattcgccgggacgaacagcgcctacgacgggaagcccgtcgtcgctcagaagatctcgcccttgcaacacgggatactccagggtttcgaatacagtctcatgcgagatgtcgagacgcatctgaacttcaccacattcgacgtctcctacggcgaaggcagagcgagctacggccagaagcccgaagcagacacttattggggcaacagcattatcggcttcgtcgtgcggagagaggtccatttttgctacggcgatctcagcgtgcttttcccaaggtccttgttcatcgatttcacgtacacgcatgatgtcgacgaagcgacgttcctcgctaaagtcgatgttaaactattcacagggggccatctcctcgagctggttcgagggcctgcgagtgcttgctacatgatctgtgtgattttcctctcgtgttggctcgcgctagaccgagttggtgtgcccaaggtgggagcagcgctgtggccatgggcttctaagctgttttccgagctggtgcaaacgctcacagtgctgacgagctacgtcgtgcatccagcaaacaacgtcaagctctcagggggttctcgaggcgcctcagcattccttatggggctttggaagctgtgtgtgctgtggttgctggtggtgttccacagcgaactgatttctatcgtcacaaaacccaatctagtcggcgtctgcgatacaatagctgagattactcgagttctcagaaccgtgccacgcgccaggatttacacgtgggaagacttcaaaacgattttccgggggagcgacgctctcgatcggaaccgtgacaccgaggtcatcattccctacatggagacctacgaaagatactcagacgtcgtcgactcgtggaggctcagccaggtgtcgttccttttcggggagtccatcctcctccggaggagcgtttggattcacaacatgggtgacttcacttatcagagcgccgagcattcgtacaacacctaccaagccgtcggtttccagaaagggtgtgtcctgcaaccgatcatgaatactgtcatacagcggctcgtggaaacgggacacctcaggcactacaagaacaacgcaggacttcatctcgccaatcaaattagggtgcctctatcgaagagatcaattactctgtttgcgatgacgtcctccttcttgggcgttggcgtgtgctacggtttctgtgttgcggtgctcttagcggaggttttcctcgcatgcgaattgaatcgaccgacgctacccatgcagtactacacgctcagggtttctttggacagagtcagagagaacgggagacgctgtggcgtttccgcagaaaattcggattcaggctcgcaatccggatgaacacgagagacaactagaaaaaaagaggagtctaatcgtttcatttcaccgaagccgttccatctcctccattaccatgctagataaagaacatctgtatgatcacgatgcatcaacatagaacatggatgtggcatacgtcctcgtgatcgacggctgtacagacccggatcgggatacgaagcgatgttttcccggggaatcgggggagtaagcgatttcgcggggatgactggcacactccggcgtacaaacggcaagaagccttgaaattgggtgactgaaatgcaagcttcactcggttccaggaataaaggaatgtgagctctgtaacgtatcggagcagtttggtcagttcgatccggccgttggaaagaatccaggactaccacggtatagatcgtactagtatcagtgcgattcctcgagcctatcctggaatcgcgtgcccaccgcgaaccgtgacgtagtcggaaaaaatcgggacgcgtttggctcgtgaacctctagcagtttcctccggctcacggaatgggatccgatgaacctgcttcaacgtctctcagctgttcgagttccggcccgatcccgctggcgcgttcgatcagcaagatcgcttgatgccttgtgtgctcaaacacttggccgtcacctgcagatccgaaatcgaacccgtctgggtcgtagagagcatcaaattactcccgagctgtaatctgtatttccagttttccggcacctgtggctattgtcaagcgacgaattggtggtggagactcgtcgagaggttttcagacgaacggagtgtcaataacccctcccaattcagtcattattttgcgaataatgaactgcgtggttttccattttcgcgaggtcgtcgagggaatggtcatgcgaagcgactcagatcagtgatggggttcactcaacatccatttttgcgaattcgttctgtcgaacaacagcatctcctgaaagcaatgtgcgaccgtcgttgatgcgtgtctttacgtgtgacacgcgtaaaccgcgttatcccttcctctgccctgaacattttgtgaggtttgaggcatcttttcccctggggtgaatgctctcatttggtgactccctttgattgtcgatccatagggcgcgggagatgaagcctcccggcgttcttcgcttgtcgttaccacttccgtttgcggttatctgtgatcctagagattcacactaccccatacagcctgatgaggtgtatcgtcgtatactctctagatcatcgcactgaggacattgcaggtttctattgcatccagagtggtctctggccatttacgactgtctggcaaggttcagaactgtgctcttggcttctcaaattccggattgcgcccatccgaattcccctccattattctcgtttgctatgtgcatgtcggagttcctagcgagtatttgcccgctcatcactcagatgttctcatcgcgaaagtctgctgtcgcaaacagaactgagctgcagtagggtgatgtcctcccgagcatgatgcgaatgtctcccgtggctggagaaatcaaacgagtcctaacgtaaacagcgattcttgaccacatgacgcgaggatctggtgtccctgcagtggaagaattattgaaacgagctcattttcagcttcacgttggttgacactctgcacttcatacacagatcgatttcgacctctcgctgtccgtgtgctgctcgattgccttcgcgaggctttcagggctctcggctgtcgcattcaatgtgaagctcaagttctcactcaacgtatcccatatggtggaaaccagtatccctgatcgtttcagaatccagttccgttcccggcatgttatcggaattacgtgtcgagatccaagcccgagcagtgcttataatggcgtcgctcttgtgtacacatcgtcgaagatatcgtcgcatactggttattgccgatgcgctggataatgatcggactgacgtgtcagaccccgaatggatcgcgttgtttacgtagccaacggcctcctgtgcctcagattcggtgtctctcattccctcacgcacccgatacatcgcatcacagaactcagtttttccagcccatgagccgcgtaggaaggacttgagtttacgttcgcattggatagctcatacggctttaagatggagaaatcggttcactcagtcgcgatccctgtaatcctcctcaagaatcatttaaacagtgtttctcaaccctcgccgccttctcatgtccgctagatcgacgattcgaaactcggagcaagattggtagtcgcggatgtcaccgctcctcctgcgagtacggcccgctccgcgtactcgaaagttcaaagatttaggggagcggtttccccttgagcccctgagatttccatcgagctgcgtggatcgacattcggatccaaccgttttcgaatagggaacgatccgaagttggataacagatcaatgatttcgcatttctgtgctcgtcctggttagatatatcatgtcgtcctgaaagaagggcccagaaagcgacggtcagctgctgatgaggacagctgagatcttccgccccctgatcatccaggattgctcacgatgcaattgtgttcggtgttgactcacgcatagagttcgatatcggagccacagcacgatgaaagcccttcggagatagagtattgaacattcccgtttgaaataaagttcctcagtcatgagtggttgaatcaatgctgcacaactagtggattggtacactgcgcgttggcggcgacgtaagtgacgttgacgcccggccgtcggtgatgactaagtgacgtgcgacagtttgcggccaagagacaggaatacaccaccgtcgatgcccacattcaagtaaatgactccatgcacgcaggccgaatattcgacggaatcagacaccgctacgtcctgagcaatccgagcgaaccagcgttcggccagcattcccggcggataggatggggcgccctgcagtccaccagtatcaacggtcagccagataactgtgagctctggtctgggaacctcaacgaatcagagctcgcttccaggtcgcaatatgttccaccgcgactaatgatgtttcgcaacaagacgaatctttgtgaaatcgtattgctgcacgccgtgcagtttctgtatgtgtcgcccgacagctcagaccatctgcacgagctcatcacaaacctgtacaaagtgtgcgatgtggacgtcttgatcaggactgaggaatgcttccctcggatcagtgctgctagccaaagccagaagaatcgagtgctttatttttcgaacacgattagtttcgatctgatggaaaaactccagatcacttgttttccccaagcaggtgtttggtgtcgcatcggcgacgatattgtgattgagaattcgccaacgctcgcgaactgtgacgcctacgtagtcgctgagagcgttgatgctttgccgttcctccttctcgaggagccaggattggaaatgttcacgttgacgccgcccgagcatttgtgcaatcgcgcgggcgtcccggattcgagtgggaacttccgcaactccttcggagggctccatgtccaagtgatatcaaactcagcggaccgagaagcggattcggtgttcttcggagagcgtataatggcggcgaagatttcgccttcgcgaaaaggctacgtcgaaggcttcgaacgcaaacttgtcacagagctcggtcggaagctcaacttcactttcgagcagatgagtttgccgtattgggttgacgtttacggcttccgacccgaccggggatcctactgggggaacaccactcttggaattctagtccatcgacggggcttgatggcggtgggtgacgtcagcatcttggatcctcgccaggactacttcgacttcacctacgttcacgacgccgatgaaacaactgttctggcaaaagtcgacgtgaaactgtatgcagggggtgagctactgcgcattatcggagctcccgtgagcgcttgttacctgacttgcgtgttcatgatgaccctgtggttcgtgttcccgaaactcgatgttctcgatagtcacgactatgcaagcgtcctcccttggctcaggaaaacgagttattggttcctcaacattttcgtgtacttcgcctcctacatcgcgagaccgaacgactacgtgaggctcgaacggaacaaaggcgtatcaacattccttctaatcatctggagattaggtatgatcatgttgacatccatgttcgtcagcgtgctcatctcattcattaccagccccacgctcgaggggaagtgttacacactgaaaaacgttgccgaggcgttgaagcgcgtgcccaagtccagaatctacactcagatctcataccgagatattctcgagactgtgatattgttgatgcctgtgagggagcgagcagttttcaaagttatggaatactacaccgaagctttcgaatcgaataacatggttgagcacatgtggacgagtagccgcatctccttcatattcggggagtcagcctcgatcagacgagccatctggaggcatcggatggaggacatgacattccagccgtcggaacatgcctacaattcctaccaagccatagctctacagaaaggttgtgtggtgagagaaattctcagcgatctgagtcagcgtctcacggagactggccatctgttgaagttcaagcgaggtgctggtgttcatatggggaatgacccgcgagttccctacacagaacgaccgttgaatcttcagtcgttcaaatccatcttcctgctcactgcgatcgtgaacgggttgtgcatggttattctgctggccgaaatattcgagcgataccagttcatagcgcgcacgccacccagggctcattaccattttctggaagtggtggaatatctgagtgaggaacacgaggaaatctcaatgcggccacatgattgcggttacaccacggatgtctccgaggggaacgctgttgtttggcctcgatgtggctccgtagagacttgcgcaacctcttccacggctcaggctgatgatagcaacgaagctaccgagattagtgagtcgccgcaatcaggttctgagcccacataacatcgaatgcatgatccacccagaacaagatcccgaaagcgtttccagggtggcattcggtgcggtttggcctggagcgcggggatttcgttgagaatgaatatttcagctcaagctcaagtttttgaccgaatttttgagccaattgtgagaatgagaggcggaacctcccacggaaattgtcctcattatgatcacggatagataatcatgggtcctgaggtcgaaacgcccacgtcggcccagaactccacgaactgcatggggcccagtttctgaaacactgccagtggactctcagctttgtgcgaagtcgtggcatctcatttcaagagcctctctctatcaaaatttcttgatcagttggacacgagttcgattggcaataaatgggttttttatcgattgtggggctcatgatgcgagctccctcgcgagtcctaagtagctttctcgtgttcatcgtcgggtccaggtgagaaagcgaccgagtcactagttcgagaggtcagctagggacctcgcaccatctatcatttattgtttggtgttaacaaccaagctttatcggcggcctagttgattacagcgttcgccgactacgcgtcgtccgaggtttatataatgtcataagaggcttcgaaacaaccggaggggagagaggacgggagatcgaacgagagacgtacggacgagaaaaacccctaaaaacgctgaaagtcggctacgttattttatacagggagaagctctctaaaaaccaaagctcggatagttgctcgctgctcgctcacccagccgctggctgcagtcacctgatattcccgtattccctcattctctgctcaccgtccctcaagttgtccttgaaaatttcctcctgttcctcaagactgtctgtctctgtcggtataatacgatcggcctcgaagctgcctatatttttttcgagttcaaaagacttataagggctcccgaatattagaccagcgtccttgcttcagagcgttggggtgaagggctccggtggaggcggaaggggattccagggtattccggagatgagcgattcagtactcagatcggtgcggcaggaatcgccgcggtggagcccggcagtcgcggaacttgtggcgttccccactagaagaagagcccagccgggttcgagcgaccgctacgaagctttcgcatccaaggggatccgagtcttccgagctgtgacttgacggtggttccggagagctttcagccgaagccctcgctgagcttgttattgaccattgaattgaacgagtatccgattcctgatgaatggcccgactgtttgacggggcgcctcagcaaacttccggaagctgatgaggaggaacatgagaccaccatcaacaaaacttcatccaccatactcacgagaacggtgagagggaagaacaacgatgggagtaagaaaagaaagaacaaactagtttcgctctctgctggacccaagctctgcaattacatccgctatacattttgcctgccgtcggtggcttgctcgctaaggaaataaccgcgaaagctcgtcggtcggtcgtgcccacccatgccctgaatctcactgctcttcgtttgcttggtttgcttcttcttggtcgtcattactctccagccgcggctcgattataaggtatccgagcgagaagctcatcatcacaaataagacgtcagtcagcacacgcccgcacatgcatgaacaccgatgctcgacaaaacgatgctacaaacaggcggaagcgcaaccaaagaacccgtcgattgcgtgaggctctcgctaatctgggaagcctcgatgaacttcgcatagttttgtccgcatcaggagcgagaatactgcgggttccgggcagcgcttccttctgagctctgttcaagctccagatttcgaccggtcgctgagttttgagtttcgcagatattcgcacgtcgcagaagtgctctatcattgatttgcgcggtgcgccataggcaactcgggagagcatcaatcatacgctcgaatgcagcacgccgaaacacgatcacaaaccttttttttccgataccagcgttccagcccataacgacactctctactcccgctgccgaatgcgttagagtcataacgagaaacaaagctcgaacggagtcgataaaacggacgaacggtcagcgcgacgtgcaccatacgtgcgtaccagattgcgtctacgcgatgttgagtgagaggtcagagcattactactactccatccatcgtatctccatcccggcgcgcttcctccgctgatgcctctgaaacttcattccaaacgtataacggggcatggagccatttcttcgctgtttcatcttcgctcaacctcacaacggtggccgagacgaatacgatggcggagagaatcagtattcctcctcacgaatccactccagagtcctggtcgagagaatcggagagcaattcagattcattgaatccaaacgtttgcttgcgacttccgatatctgtgtgtttatcgatggaataagtttccggtcatgaaagcgcccgctcgcgaccgtaccaaaacaattcgaagagcaactcgaccgattagcgtttcgatagctccagcaaattgttttgcttaggaatcgaggtgaacggatacggtcacaaaatcgaatcgatcattaacgacgcagctctagaagtaatcgtcttgcgtccctcaaagccccgcccccagtcgggcaagcccaacgccaaattgcagtcgggatctttatctgtcgaccgcccgacttcctcgttcgacaatgttccggagggcatctatgtcgaacaaagttttgggagttcactgcgtcgacggcgcctgtgtgttcgctgttctagagcccgtcttcgcctctctgacgcccccccccccctcccgaccctagccacatcnnnnnnnnnnnnnnnnnnnnnnnnnnnnnnnnnnnnnnnnnnnnnnnnnnnnnnnnnnncgtcggtcgtgcagtagcagtcaggactcgcctgttcattagagagactagaacaggcagacttggataggattccatgccgcttccaggggtcaattgtttcgaggaattcgtgattagtatttgagtctggctgcaaagccgcgtcccacccttcgacgcgcaacgcaccccggagcggcagcaggccgtcagcttgacaggtctgtctaccaaagcacaactccccgctcagttggttgacacgtacgcactgaagcacacggccacgccgccggccgtctgagcacgcagtgtttgtcgttcgatttagatgaatgcgacccatgctaaactctctctgtttacactaatttcgaacaactctgagtccgaaccgtggggcctgttcgcttccgttcgttatttcacccgcacggatccgctcaccgtcgacagtgcacgaacttccctcgttccgggagacactgttttcacttccccgctgcccattaggcgcgtccctctgcgcgcgtcgtatgaacctcaaaagattcaaaacatcgggaggtatccaatgagcggatgaaatctgaactttttctccctcgtctatggctcgtttccgcccatggagttgagaacctgtttttttatgtgggctgctccagtccatcacgagagtcgtcttcccacgtggtctcccagcacactctctcaggctggcagtgattgatgccgtcgaccgctagattacctcgggagcattagaatcactgaacaccggtatgattgatcagatggacggtaatcccgccgaatactcctccgccgattcttcagcacagcaaatcgtccgccgggtgtcaacttgcagtgaccgttacgaatgtgtggtcattagggcgtgcggatccattacacggacacgtgcaagttttaagtgcgaacttgtgtttcagcctgatccatttcaagtcttaattattcagcgtctagagcctccggggaattattattacatggaaatttaggatcctccatcggaatcacagttctatccgcgaatatagtgacgagctcccctacatcaacggtatcagaaattagccatttcacacggtggattccacggagtgatcccaagggagagttcacacgaagatgccggttgcattaggggtccaagaaagtttttttcttctccggtttccgcattctcaaactttcacgcgccctgggagaaacacgggccgtctgcgatcggaaacaacttctgattgttgttgttggtcgatctccgaaatccgaaacgttgattgaaaccagaactcgctgctgtttttttttccgaattttccacatggagacaccacgcgaggatattcgagcagttatcttcttcaagttgaaactcggagcaacggcggccgagacggttcgcgagttgtgtaccgcgtttgggccctcttgtgcatcgaacaggatagttgagacttggcactgaaaatttcgtcaagggaaggtaagtctcagagatgcccccaggtcaggtcggccgaccaagattgataatgaggttttgtgttccgcgttggggcaaagtcccggactaagttccttgcagctagcgaagaggctgggtgtcagcgatgaagcaataagaattcatctgcacgagatgagtagactctataaactcgggaaatggatacccctctatctgacggcctcccagagaaacatgcgtgtagccatctgcctgtccttgctgtagcgagaaaccgtgtgcagttttctcgaccgtattgtaactggagacgagaagtgggtccagtacgacaacggaacgcggggccgttactgggttcgcaaaggaacggctgctgcggcgcacgcaatgcaaaaaaacaatcgacaaaaggtcctgatttgtgtttggcggaataacagaggaatcatccatcacgaactcatggagcctggcgaaactatcactgccgaagtctactctgcccagctagagcgagtgcatgttgcgttgctccggaagcaaccgaggctcgtcttaaggcgatgagtcatcctctatcgagacaatgcgtggccccaaatcgcagagaagactcaggacgcaatcaaacgcttgaaacacgaagcccagtctcatccatcatacttaccccaccttgcgccctccgactaccatctattcttgaacttgcaaaacagcctgaacaacagaatttccactgcagaagaccaagtgaataatgccgtcgaaactttcttcgaagaaaacgaaaataaacttcaccgagagggaatcgccgcgttggtggatagttgaaggaggtgcttagctgtcgagggtaattacttcgattcgaaccgcattcgccaatgagaaattgtgtgagtcggagctctatgaacaaaaccggaaaaaaagtcttctttgacccctaatagaagatgagcccaataccgttactgctgtttgaggggaccgtcaggagtaatactgttactattcgctgacactttgttcctggcctcatccgcactgatatccgagcggaggatacttcgaaccaatcagcaactgcacccagattagtgcaggggaccggttgcggttgcgtcggggccagggcaaactgtccattctgagtccctgtgaggttatgagcccccttaacctgttgagtgccatccatgcagaacgaaaccgcagatgccaggtgccgcccatgtatatgggcttgagggacgcgggcgtcccccacggcacctggggaactcgaaacgctctgagagctagtgctgtaaaatttcgaatgaaaagacgttcagctcgccctggtgaacttgtatttcctctaatcgtgaatgctagatcggtctgggatggagacgatattggggccctctttgcgcgaaaagctccgcgttttttctcagaatcagagagaaaaatcatgacagatattatgatcgcggaatcaaggcgttagtgaacaaatctcatcggggctgccgaacggctcccattgaaaccgaggcggagtgaaagctcatcggattcgattccgatcaggagttccagctcatccttcggcgcaacgagaaaatttggccgcggtcgcggagagtacgtcaaagtcgaaaggtcgattttcgaaccacggagataccgactcttcctcatggaacgatgcatcacgatcaaatggagtaattgtcgacgattcctgaagaatgtggaaaccgaaatcgatccgctgctcagattgatgaagggaggctgggaaggatgtgtccggagggaactcggcgggtcaatactttgtcgcccgtcgctttttgtccgcaatatttcccagtgtctgggttcgttggcctcgcgtctccctacaaatccccttttaattaatgtccacctctcggagatccgcctaatcctcgtctccaccgtcaggggggaggacaaggaggaggagaaacaaggagggaggactggctggttggtgggaatgggccagagtgccctcgactttcgaaatccgcttcttgagctgttgagcccccgaccaccgagtgcaatacggagggtccctcggacaatggataaaaatcatcaccattctctaatgatgcaggccgctttagttcgttagcgtcgttcgaatcatcaagctgggctttcctaatgaataccgatctcccaattaaaaataaacaggatacttatcctccacaatgtcctgataggcggctgtttatccgccgaaaccctgctcccccatctcgctctcatctgatttcaaatgtggcgttcgcttcagcgaaatcccacattttgtctcgaatcctgcggaaactgaccgtatcccgatttccagtttgatgctcgagcccgctgcatcaacgtgccttcggcaacactccaagtcagaaaagtttcggcagcaagctctggcgaaacccgagcttctgattcgttcaattttacggcgtacatcgtgaatgtatcaaagcggttatgcccggcaagaaatcagtgagaaggatgaaatcaaccagtgagacggccaactggacagtacggtctggatcttgacgcccgaattcgcattgaaacatcagagcagactcgagcacgagatgagggcgtcaacgacgtgctcgacgtctactgctgaaggttcatcagctcacttaatcctagtctctctcttcaggcgaatgctggagcaggtctttcgagcaactcagctccaacagaccgtggtcagtgtacagaagcgggaaaattaatcatattcgcgtgatgtgaattgagtcagaaagttggttctcggaatgttccatattagctcggaatcccgggggtgagagacgccgcgtgtattgaacacattatacaagaaatctcgagagatggggggaagactgcttgcttaaggaacaatcgagtgagcttctctcgattgaatgctttccgagtcctgcgacggtgtcgtcggaaacagcggagcacacaacggacagaagacttccttaccttaagtaaacaaaaatgtgaaatttattattacaacgtctcaacagtttcgggtcctccttcaaggttagaaatattgtacgagccgcccgatttccagtgaaaaagcttcctgtgttctggtctgtagcgcctcaagaataaataaaaaataagtaacaatgtcatcggtttctttgctcggttccgtttgagggtgggataatgcacataatatacaagtttgattaagataccaacaactagttcacatatttttgagtcatcattcgggaattgcgggtttcccgtatgctttcgacaatgagcgtgatcttttgttattcatgtttgatatattttctacagtggcagttgcattgttcttcggaacatttgctctgtgacatcttcggattgtacacaacatggttatttcttgttgttcgtgacgtagttcgaaacctggtcaatttccttcacagaatcattgaatattctacctagattaccggtacccggaaagagagagaatagagtgtgttggatgcagtttcaacattgttatcgacccttgggagagcggtggagtcccgcctgattcctccgaacatgaggagttcgcctggaagtcagaaacgatcgatatttaaacgatcgagttattcaagccgaccggcccataaaatgttttccatggtgcgcccgacgagtgcgtagcctgaagcgtatccagactgccgatttcgggttgttgcacccatagaatgatgtgtagctatggggaacccctcaagctagctgagatggacaagttcgagttcacgaagttccgaatagcttctgcaacgcaccttcgcccttgacgagtgtgtagagaacaagatgttcgggttggcgcgctgaagtttcaccccgttcgagccacgtgactcgatggttttccacaagctcggaaatgttgagtgcatagacacacatcgtggactgccaggctttcgtactacggggaaatcagcgggagattattgacgggaacgagggggatctccgagtgatgtggctccgaatgtagaatctgtccttcgacagattcgacatgagttcgacatgaaatactgcaccaacctcgcagagtggggagggaagctactttcgacactgtttgccagagctgacgggcccgggttgctcgacttcgagaacaaatcttttctcgcataacggctacgtcccagaatgacgacattgtctccaacacggcacgccggatggaaactcaacctgtaatgcggagaaaatcgattcagaaacgcacaatgtgttaagaggcccgggaatgcttgtttctaggtctctaagcgaaagcccaagaatcatggctcactgacctgggagcgccgtctttctgattggtcacctcgaccaaatgccacttccaatttcgacaatcagggaaaccttcagtctcttcagcgtttggggcctggaatcggagtagcatagagagttattcgtgagttcacgatcactgcggcgttctcgccactcactatgcagagcttgcgcgtcgcgcgaaatcgactcggaatcgggagaattttacggacctccagcagccacatgtcgtacaacatctcatcaggtccactgcagccacctgaaggaagaatactacggttgagtccaaacttgtcctctggatttgaaattatgattacggaacccgctcgagtgactatgcttataatcatattgaggatgcaggatgcaagcgtggaatcttaccaataataaaaacatgatggtcatcgactatgatttgtgagtgcccgtatctggctttgggttttctgccttctatcgtctgtctgcgccactgcatgcaacgcaaatcgagcagccaaatgtcgttggacctgtcgaggaaacatagttcaacttcaaaaggatgattcccgcatatccgagtgtttggttgaaatcgttggaaatctcctaaggatacagtcccgttcctctctcgaatgtatgttatcagtgttatcggctcagggacacatgctgcactcacatgttgtaaggtggacctcgtccgtcatcgagggcttggagcccaccaaagagaagcatcaaatttgttcggaacaaagcggctgaatggcctgcagtggccgggcagcaacctggaaccacagacaggattgaaactattcggaagtggaaaatataattcggcttctctcaacctaacaatttgagtgttcccatggaattcatagcacagacgcggttcaacacacccgagctctcctgcctcgcaacctcggtccagctgttcagggttggatcgaacagatgtatgttatcgaaaatccgccatgactgaaacggaaaaactattccaattaagctgctatgaaataacaataggccaacaaccttcggagtctcgaggtcgaagggaagtgcagatggaaggatgagacgccaatcaaattgtaccactcacgttgtacagtgggtagtatggtgaagtgtgcgcccagcccccaaagagcacgagtttacctctgtacgcaatcagagaagaacaagcttttggaggcgggggtgtcccaaacgacaatggtctgacccagactcgtcgtgagagatcaaatgacctgaaaagggaaaacgccgaaggttggataaaatgaggtgaaaacgcgggacattcaatcactatagtacccatcagctcttgagctctgaatcaaggagctcggctgaattcgacgttgcggagaatttgtccacggcagtcgctcaccagagatcgttgtatgtcgtcgacgtattcgacgtgcagccaccgaaaatatacatcttcttcccgagcactgcacaagcgtgggaatgacgtttctggatacctgaaggaggtatctagctcagaaagtgcacttctaagtattcagagtccgactcctcatgagaagttgctataaaatgggtacacactggatagtcgggttctgggattccgttcggcgatcggcttacatgaggacatccctgtctgaggtttctcgacgaaccaatccagagcttgattttgaactgcttggttcatgccacgtcttttcttttcaagggcacgttccgccaattggctccacaaatgattcacctacggagatagaggaagccagttcatagatcagaaaaattgattcaccgctggaatccacgagcagcactgattttgcggcatcattcgacaaaatatcagattcggagaatcaacccggaggaaaagtctctcgctcgcgcttcggggaaatatcgtccttcacgggcaaaattgacaatctttgacaacaaacacttctattctggcctgcgaattacggacagccgggaaatgacctcacctgagcgcatgattcaagatcagaatagggtgagacgtgcagaagtatgtactccaggacatactctggcaggtcgttcatcgaggccatggtcactttctatagatggtcacaaattacagagaacgttaccagcactccttcagctaagatcgagggtgacgctgtgaatgtaacatcacgtactcatatcatacgttcgtcccttccaagattcgaataaacgtcagaaaagctttgaaaatcacctgtccgacagtgtgtagtggattttgagcagctgcgacggggcgcgaaatctatcaccccaatctgtttaaattttgaaagcagatcttggtcatctcacagtgttaggagagggaaatctgctctcccaaacagctgggaatggttcatgagtctacagaagggacaatggcacatctttccagtctcaaagcgaatggaagagagagcggccacaaaatggcggcgcccagttcaaaatttacgcgcaataacacggttctgtttggaagaaagagatgtgaatagacagccatcatgccgtcaggcgagaagtacgacctttaaaatggcatcagttcatgagccgacaacagcccacctacgggccttgtggctttctgtcgccagagatcgcttcgtcttcccaatgaaggagcgcttcccatgctccatggccccgtgaatttcagatcctgcgaaaactgctgtgagggatggctcttcgaatgtggagcgaagcgctgaggtagtgcggcattagttaggcggaagaattcaacttgggaaatcgtgggggaaggacttgtcagatgagcaacatctacattggaccttcggagggagaagttttccaacatggtgctcgcggggagcggcgagtcccacaaggctccggaaactttcaagctggagttccgctgcacagctgagcaggcacgtcaacacggatgagtgaacttcagacttcacgagtcagcttatcgccataatcggtttttatcggtaccatcacagaggaaccaacctcagttatacccggtgtagaatgacgaaaatgaaaccagacttctcgaggctttgacaccaagacaagctctccctcattcatcagtaacggcggcatattgttcttgttcatggaggtgaagggatgaccgttctgtcgcccagacatgggtgagtgagagcactccaagccagaggtcctcaaattgatactgctcattggaactcgcttcactatttcctagactccgcttacaataagtgctggtgatttgctaaagccttcaggatgctatattcgcatgagttggagttcgcgatcgagcagcgtgaccatgagcgggagccatgtcgaagagctcagactgattaggagtggcgggaacggcaaagttgtcgtgatggaaaacttattatattcctccaatgtggagttcaggcagcgcgattcgtcagcggcggtcagaggtgctgcgatgatcaggaggagtgcggttggatgaggaacaacttgctcgagtgagctggatagttttccgagcagggcagaaaacaccacctgagggtcgatgccattaatgagcatggaaatctccagaagctaagatccccggactcaaagtcgcgaatgatgcgacgatagatagaccttgagtttcctgaaccagcgaaaggcaccgactcattcgatatctgcgagagcgttgggatcactgtcaatttcgggcatgcagcccaagtcgaagcgctccgacctgctatgttccaacggactttcaacgattccattcgcgttcctgggagatctcaacgagagcggatcgaaagtgcacttccctggaacgtgactccaggcgcgatctcagtgggttctgcttcggagactcgaagtcgaaatcaggaggcgctcctgtgttttttcttgcaagcgtcgatgaatgccgtacgaggtttgccaggtatctcttagtctccgatctccttccgtattgaagactcttctccaaacggtttcgagagcagaagtttcatagtgaacacttccgcttgtcacacattaagtttcctagacaacatagtcagagtgctcggcgagaaggcgcgcgagactctccttcaacgtgtgagatgactcacatttgcgacggtgtccagaatctcattatcccaaataacttttaaataattaactaactcagaactatgatccaactatgatccaactccgcctcgtttccgagcagctcagatcattcttacacatgtcgatgtattccggcaccagcgagcaactatcctgggacgagattcgtcgcgagtcgtaagttaggttctcggcggagctgtcagaggagtgaataaacaccgcataccgaataccccgtgggagtcctcgacaaattcatttccgccctcggaaaacagttcatttgatcggcgcatacatctggaacggggaaggaagccagaagcggacttccgggaggcgctcagaatactgttactctcaatccacatccaataatctatccatatccatacatgtaatcggctgaggtttgtcgccggaaagttccaactcaagatcctgagagaatgaatgccttcattttgtgcatatgaatagcatccgaaaaatcctgggagatgtaacgtcacttatgacttcaaatgtttccgcgagcttgattgagaccgcagatgctcggaggagaactgctacagagccgcactttccgggagtctgcgttagcgtatgaatagaggtcgcgaatactcgggtctcaggaacgggatgagtacccgttatccatccattcatggagatgatttcgaagtcgatccaacgaaacattccggagctcattgaggtcattctggtcgacgtgaccatactttacgcccacgacctgaatggtacactggaaagtgtgtcgtgacgagactcaggttcactgatgcccgcctacctcgaaaccagattactcgtcgttctacaatgaaatggagcggttattcatgatgttcccggagtactaggaattcacgtcccagacaatcacgcagtgatacgagtcagaccagaatcgaagagcgacttctttgatcagcctgcggggtctcagtgtatgtgagaatcgagtaaacccagttgtggcccaagttgtagtttcgagggcgaaatttagtttcaaggttcatttcatttggttccatatgtaccgctcagatgcattcctcgtctctggggatacgctctcttgctaaagattgcaatcagagtgcgtcccctccaacgctcttgctcagcatagttgtgctggaattatgaccgcaataccgccaagtaagggtcgtataggattgtaggatgtttatggatcttccatgtgcacaatattactccttcgatctcaggggcggaacgttctggctccgcagatcacttcgctatccaatttagccgatggaagggtctctcgccgggcagatggagttcatcgtggttaactttcgctcgtgttaggccgaagttggacgccagcagaggagtcccgcaagcggcttttgagcaacttgcgacggccggccgcgctccaactcgaatccgggcgtttgaagatagcccagattcagaaaggcgcaccggagccgggagagttactggaaacttccgagcgaaaccgtgcgccgcgagaggaaacgattttccgaactcagttgaggccaccttccgaaggatcattctaaacccacggactgatcctgtcccatgtatggtcgcatccttccgagaagattttcatgagttcgctcgaatgagaattgtgacctggaacatggtgctttctaacgaaaaacatcggctggaaaccgttccttccgagaattgtcgcaacgagagactgagagagctgtcagttcttgtctcgagccaaggaggtggccgtcgacaacccgctgaaagccggacctcccgaccccaagctgcgacaactgtcctcgattctttccaagttcgagcgcaacactttgcgactcttgagtcacaccgatcgcacgaggaacactcgtgagaacataaatcgtataacacgtgatttttcaccgaaattcagagagcgccgccagtcttcaatccagaccgactctgaaattaaggaagtggcgacagcagaggaaccgcaagagtcgagatcagaaaccgtaattcaagcttgaatttctcgatgagctagaaaatacaaaatgcacgtgcacaaaccgtcgaagcatgcagtcaacgtgatcgtggtgcgagattttctccgtgaaggccataccgtttgaaacatcgtgggaaacggcggtttcctcagttgagcgaatcagctcgcagtcgtactctcggcagatctcaacgacgtaaagtatggaagcgacgaaaacattccgtaactccgatggaggttaccgaacttcggaatcgttatagacctcgctggtacacgtttttcaggagattttcctatacttcgatccttgcgtgcagaggcgacattgctatttgacactttggtatggaacaagacctaggatatatacgatcaatattgttcatttcttccggtctcgctcggcagagcggacattttgcgaattactccgactcgttcaaaacctgattgacgtaaatcctttactgaatcgttttgaagtccacagtatacgtggggctcctcacgacgaccgcgaagctctctagctcggcgatttccttctgcactctatcgactcccgaatccatgaggacagctgtctctttggagaattcgaacttcaagggtcgggtcagtcagtagtgtcccactcttatgtgcgacttgatattcgaagcacacgagagctttcagcgattcagttcagcgatttcgatctcctcgggtagcactgcggtttcgcccggcgtactcgattgtacgctggaaatatagcgactttacagagagttgttcaggatcagtgcgagcagctttcttctgtgtggagccctccaacgtgccggctttccaaaccagttcaggatccaacacttcccggaccacctggatcattctccgctgagttctcgcgctacagtaactgaagaccttcgccggtcttccgcgccaggcagtgctagcttcagaaatctcagcagctccggcaggtcccgaagctctgacagccctgaaagtctcccagaaagtcgtatctaaccatggcccacagctcctttcgggtgttatgcggctttaatttgcctcccttctacggtctcagttcagtttagtgctcccggttttctcttagttccgtgatctccgctgccaaggcctcctcaagtttgttcccattctcagaggtggtcttggagagttcccgatggggaatgaccagatccgttgcacctgtcgtgacacgcacacacgttatcccgtggaccgcatctgtgctctcggtacagtaatatcccggatgattctgaattctctgactttccacattgaagctcttgattgattgattgattttatttcgattttccatatgcacatatggtccctttcgtttcttcatgattgtcgcgccaagtcgaacaccattgaaaccggataacatcctacctcggaatttctttgcgaacgagcatgcgatcaagagaatcacctgcaatcagcacgcgactaaccgagctcaaaatccggtcgaacttctgctgtggggctcctcgggactcaatttccgttctgaaagatttcaggggattcgacaattctgggaaactctatctcagagcgctacacgacgtctcacgtttgccgtgcactttctttgcaggtcttccgaatctacgggtgcaaagtgtaccacttgttcccggagaagcgtcatacgcactgcttcaaatacgattgaaccatgagatggacttcattggatcttcatcctcccattctcatgattcaagggctgaaactcgggccgaaagcgaggggaatacaatttttcaatgacgctggattttcgtgcgcgcagatgaagtcgactgcagtgccatcgctgcgcggccatcctattccgccgccgtcccactatacgacgttcaattttttcgcgcaccgtagagcagacccaggcccagactacgtgagaaacttgttctggtcactcaggtcctcacagccataaactgcagtattggtgtagtgtctcaagaccatcagagatgggagctgcgctgaaccttccgaagaaaaggtaggagaggcagcgtcgtcgacatgaaccctctctagctcaagttacagtctcggccattcatggggatcgaaatttccgcttcggggtgagattgctcctcttctgagctggagtggatatccgctcagagatcgtgagatggtttgtctcgtgcgcaaggccgctttcatgagctgtcgcaactctgtggcctctctcccgaagaccctggcccgataatagattatccgatcctcattcccctcgctcaaatgtgcgcgtcctcatttgagctccccaacgcggatgagttcctttcccgagtcatggtcttcgaaaagataagtaaagaaaatggaacagtttacaaggaccactcgatgtaacaaacgcttgttctcgtaggccgagcgtgaatataacgttcccaagtctgggttgtgcgaactctctctgcattgagtctttatcgtgattgaccctttttctcggacccgccaagcacatcgtggaactccagtcgtcggcttttctcacagtaggaagttgtacccgaccttgggaagttctcagcggcaagtcattgggatgggtggttcgaatgtgcagaaatatcattggtatcagtggtcatgccccatactcttttcgatacacatggattgtctgaaaggctgtagacggtctcagggttctgaaagcgcagtggctctcaactcctgactagaggaagttccccgaggtataattctatgggcgaagacaccgtcgttcgggttagagagcgagtgctttgtgaccggcgatcgaaagaaattgtggatgggcagcatcggcgccgaacttgcaggggcactttcctttcctgaacatcgctcgcgaaggggttcgtttctgaccgcacacaatcaggcaggtataagatctcatcgtcactcggaccgacggaatcgctgtcgatgcttcgagcaacaaagccgatatctcatttgagtgccgagaagccagagaaacatggactaatttcttagctggaaagtcaggttcttttagggttatctaccacagcacccagggctgtgcaggttccacatcccatcagaagttctgagattatactatctcagtggagctttcgaaaccgatgtttgatctctagcaatatgacatacaatctggtagagcgaccagtaaagaccatcaatcccagatatggtaacatgaggagcgaaaacctcaacgcctcgcttctgagcttccgagtcgaacaaaagctctcctgctgttttttacgaggcgatccgaccgttgtcattatcgattggattcatattagagtgctgaatgagatcgtgggctggggtattgagaaatgtctctcattcctgtgttcaagacgtttctaacttgaagaaacagaatttagagctctggctagatcagattctctgctgctttaatccgcggaatgcagccttctcaacctaatggggtgaaagtcggcaacgaaagtcccgcaacaatggattgaatcaattaaactaatgaatacaaccgggtttcaaacatgaatggctaagttcacaaaaccacgaattgaagagcccagattcaaacgtcgaacctccgaatttctaaaaaacgggttctagtcgggaactcatttcgagcttgtggaaacccagagaacaaagagaaaaaaggactgaagcgttcctgagaagggcgggaaataacgttgtcggaaatcggttcgatgcatttcggaatgaaaactcgacttcgagaaatttggagtcgtgccgtttcgaatctgggctccgatattgtcccggaatctacgataggtgattctgatgagcgatatttgtctcccgaatcgcgaacattgttggtctgtcgcgagttttctccgaaacaggttgaaaacgacttgattcagcgacggtgcgatgtgaagtgggacccactcctgaagagaggaagcctggtgtcctgaagacgaattcagaaataccaccgaagcccggggattcacaagccttgcatgaatatccggtgaatccgtcgacttcggaatcaccgaacctgagaatcaatttcccgcctggttccgacacggtcgctcttcagcctgcacaactacggttcgcacttgctcggcccagagaagatgcatcttccacgtgtgtgaggatcacttccatgaaccggagaatctagatttcgcaacgcgaagagctcgcaggtactccggcgagtgagaagcagtggccatgattcggcttctggtcgaggtcaggtatatcaccttctctccacgtaaaccacagctggaattctcggatagaaacaccgccccagagcatctgctcaacagtataagaagagcctccacgaggcgatagggcaaaacttctcgaagttctctgagcggaatatctactcagttctctccaaaatgtcgacaaccagaggacaggaactcaaggcattgatactcggggggtttctgaacggatatacagctgaagagctgatatacttcttcggttttccgagcttgctcgtttaccgactgcaacgaatttttcttgaagaaggacgagaagaaggacgagaagaggacgaggagatcgtcgtcgattgaagcttccaaacggagcggtgcaacgcgacgttcccgcagctgcttgtctgaggattccgaagtttaggacaagactcagctacttcaagcagacgtggtatcgccaacagctgttccagcatgtctccagcatcatcaacttgtacatataagtgctctcacgtatgctacttcaataaatgcatcttgccccgggtgggctaaactatgtcaccgaagtgtttgtcttccacggcatggccaggaccagactacctgagaaaattgttctggaggctcgagtctgtcagccacaggctgcgatattggtctataatagcatctgaatgtggcgaatggcaaagcggtcaatcagagttgttctgccttgtttgaagcgatcgccggcggcttggaaacagggcgagcgagctgatgaagtggtacagtctctcaagctgggttgacaacctgcttcagaagcacagcgttgtggagttgcaccattggctactagtccgaggattctgctgctggagttcagctccgcgatcccaaacacacccgataacaaacacaagagttctgtccaatcgtccagctattcagattctttctccaataactgctcagcgaggtaagttgcagtggacctacttcctggaaagaacgaaagctccccggctagacgaacggcgaacgagtcaatttacaatctcggttacatgagcgggctggtgtaggtagctcaggaaaaattcaccaagctcttggctgtcatccattgtcttagatcgcccatgtccaattcgctaagtcgtctgaatccttggatcatggctcggagcatctccctgataaaatcacgagaatcaacatggtgatcacggggaaacactccgatgctgccctttcccccgccgaagagtgcaaaacgaggaactgccccctcgaaacaatcctcggtatgcccccgatccgagtatcacaaccaaatacgtgatcctgactcgcagaacattttcagccgctctgaactgtctacatccatctatcatccagagttcaagaggagatcgctgggttttttgaagggtacgtcgcagtccttccactcgtcgagatctttccgttcattgtcaatcttgactgccctcgacttttttcgatcctaacgatcttctctgagagttgaagaattcacacagttccagatgagtcttcaatatttgtgacacgtcagagaataccggtttcgaagacgtcagtgagcgattccaatgatggcgagtgagtccacccatcaccaaacgtcgtgtgttgatgcaaggggttcgagacctatcctctcttcgcggacctatcctctcttgaaaccctggaactgggcggcacgaggttctatgcggcttttcatcaacatcaagtcatgctaaagcggttgtattctgtgttcgaaagccttgccgaactctcgcattctccacatctctgcgatctacaccagcgccttcccctcgcaaatgatttcggtcgaacttggtgagatctggaaaaatgggaggaatcccaatgaatggacggaataccctcgcgggaagtaatataaaccggagagggaatggggagatcgaccagatagccgagcggtctgagcggtcacatgcatgggcctcacggcatcatactctcgagcagcaggttcgattctcggacgtctggttgaagaggcggacctggctccgatacccagcctggctcccggcggccggcgaattcactaagcctcgaggaataggtcaggcgatgaagaagcagttgagagctggagtggtgctcccgtttccgcattcatgcattggactccgcacagatccctcagcagcctcgaccctggaaggccgggagctcacggcagccgttcctggcggctttctcagcgaactactcgatctaccatcccgatgtcaatctgactggtgtaccaataatgagagtcggccatcgacggggattcaggatgagacgatgatatctttcgcggcgtcacaactttccgaggtgctccgctctcattttttactgcaacagggatgctgtgtcgacggcggctgctgtcagacagcacgatttccagacagaaggctgctcggaggagttgttttgagtcccaacgggcgcatggagcagtcgtgttctgaaattcgagattgttcatgactaaactcgagattcccatcgaaccagaaaatcatcacggaggaactgctcagcagccccttgattgatatcccccaatctctcagaaccgtcgtcgaacacggggaagtcgcagctcagtagttgcctcgaatgtcgagcagctgcagtgaagttcaacgatgaccttgcctgcatgtggtgagaggctttgcttgaatcgatgtcgatctctgcccgttgagaacagttgctgatcagcgtcgcgagagccgtgagcatctcaggatcgatgtcatcttcaacctccggcttcaaacacaaacgtcccattttaatcgctttttttctcgtcctcgaaatcagaatcctcaatcacggggagatcgctgtcagccttcgcgaattccgcaaggcttgagccagccggaaaacgatcgcggatggtgattggatatacatcaagttctaagtctgatagttgtgtggctccggattcaccgtaacctgttggctcgatgactggcaagcattccttgaaactatcggagatctgttttcggagtaacatcgtccaaagcttctttgaggaaccgaatgcccagtagaatattcaccttctcgaagtcatgggacttagcttggaaccgatgattctctacgagttttcacttgtacaactgcttgagagtatgtacaataccttggtccaacgcctgtgtttccgatgttgtgtttggtagggggaaaatgattttaatggaggtgagatcaagatctacatcatgacatctgaaattatccgagagtaggatgatccgacgcttctccctgaacttctcatcaagttccagaagccattcgcaaagtttgatagctgtggcggatcgcgagttcgaaggaacaatcgagtcgaagatgaagaacagcgaaaggtttccgagtgatgggattaggtcaacattactcatacggtacaagttaccgaggctgtcgggtctgagttttggggagttatgaacgaaagtccccagttcgtgatgcccagaaaagcgaggcttcacgtatatctaacgttctaacgatacagtaggtcgtggcgactggtgcttctcccgagtttcagctgacaccggaaaccctaggactgaagaaaatgatcccttgttggcgactcacgacgatgcaactgattagtttgtttgaccattccggcgaccttgtccatgggttgcagaaatcattcgtcgaagacagatacaaagacgactagggtatcgttatgaatagatgtacccgctgtctgagaactgaaccttgaagctatacttcgactgcgtcaggaactgtttggacagcggttgcagatctcaagaggtgtcgagcctccatcaacggatggaaagtccgtatcaacatgatacactactgcgcgtatgcgtgaacacatttcacgcaatacggctatcggctttgagcaggggtatgtgctccccgacgtcggcatctctgagcgtgggagtgaaaacagactctacaatactggctggtgctaacgtgaccgcaaagcgtagcatcgggtcacaccttctttccttccgatcatgaggtgagttacctcacggagttcctcctcggagcttgctgggagtcgtcggtcggaatttgccgctcgtctggagtcattagccccgcgaaagcccgtagtccaaaagtccggcttctccggggggcatgaacttaatgcgatgcgatttatttcattacgctggtgcctctatatgaaggtcatctcaggcagcagcctggtattcgattgactgaggcggcccattaacgcccatgatcgaacttatggctcggccgagggctccggacctctcgacaaagcggatttctgcacaggtgctcatgatctctgaggagtttgtgcggcaggaatccgcgccagactggatagttttccacagcgatgagcggctcgttccgagcctacaagcataatgaggtttccaagacaaaaatcccaggggttccgagctgccgaatcagacgaggcgtaccaattcaaaaatgtcgagcctcatagcttccaatgcagaatcgtgctcagatggagacttcggagcgctggggatggggtcttatatgtgctggtcacggattaagtcagtgaccagatctgttccatgggctggaactccagtacttgaaaataattattcgagatcgggaaactattccttggtcattgacgacttatgggaaaccgctcagctcatcatcatcctgctgctcttctcgtcggagcatcagcacaggaggagaactttcgtcgagaactgctgcaaacccgtcatcggagttctgaaggagccaactggaaccagaacaagccgtggccgaaagcgtcatatcccagtttcccgggtcccagtttcccgactcccagttacccgacttcagatcaccctcacccatcgccagatcctgatgctctagaccagtggttcccaaccgggggtcctcgatgcgatcaaatgctcctcgctaaatcgagttgaggacaccgtcggagcgaaccccacccgacacgctgattcttgacacagcatctgaaactcgctgaactttttcacctgctgacgtattactggtggatcagtattccactggttttgaggacgattcccttgttttatttttctcgccgcgcgatcgtgccacgagcggggaactcgccaagagcagtcgtccgagattgaaaatacatgatctcttggtattgacattgaattgaaattaaatgcgttcagacgaacgaatttctccgttctgacgggagaatcagagaaaggagggcttcgccagcgtagctattgcgcgtggcccttaattattcgggcaaccaacggcgtggcgtattctacatctttcaaagaagatcgagagcagggaagggttatcactagagcctgggagctcaggcaatttttcgaaatcatcccctcatcgcaatgaatcaatccgggccattgatagaataaatccggaaaattgcctgagttttcaagctctagtcatcaccatgcgcaaatctcattccttgagcaccctgacgtactcttcctcgtcatctacagcagcaatcgtcatcctcggagactgtggatttgtttactctgagtttgtgcacgcgagtcgtcaatagagagtaaattatcgtagagtcgtagagagtatttgtattcaatggcgacaacaacgcccccgaacgatctttcaatgtagcacgatcgttgacagcatgcttttggtcgggttcgactacggcctggaagtttgggcgatttttcgaaatcaataaaccaatcacctgggcccgaaggtcacgtttacttcgtggctctagttatgaccggagctaggttgattagctcgacctcgatgcgcatgcacttgaaactttgcttgacattcttgtacacagtttgagaaggttggatccggtattccggaatgggtcatgaaattacctgggagtacaggaacttgccctcagacaaatgaatgatggggttctggcgactcatccattgttggttacatcagatgggatgagaatcacttgactgcgccacggacgcctccgaaagaaagagaaagatgttagcccccttccaagaagatcctgcgtaggcgcctgttcgtttttgggccggattccccgaaaagcgcacgcagcagcccagcagcagagcgagcgatggcacggttcacgcgattatgctgttcggctcacgttcacttcggaaattccgcgcaatttcgtgaaccgctgaacatgactacctttgtgtcgaaaacgcacgttttgcgggaagtctcactcttcaagctaaactcgaagaagaatgcgacataggcgcacccatagaggtacagaatctggaggtgaacatgctctaagctgaaatattgagttttccaagcgggatcggagactggaactatttggtaacgactgaaccaacatggaggacacgaggtttcccctaccactctacagccacttcttctggcagctcgattcatcattctcgaaggagatgctgtcttggcttacttcaactttcgaagttctgtgcgcgtgaaccgccacgcgcaatgagcttcagcgctgagagagggtgatttggagtcgggttttgactggggttcgggcatctggcacccgaccgctgaagttgggctcgcgttacctgatttgcagaggaatttccacttgattcctggctgctttcagcgtgagtaatgtcgacgcttccgggtggatcatcaaatactcatgcccggactccaccccgagatagattccatgaacttcatagaggaagttatgaatgaagtttcgagatgcgggctcaactgttcgcagagagccaagctgcgagtgagtgagattgagaattcgaaaccagttcctaacggattcgccgcaatcactgattccctcgggggaaactgctatcactctctgtcgtgtgaagcattcatcggtctctcctctcatctgtcatccgtcagtgcgaagcgcatccaagacattcgagatcaacatttcgcagggcgcgccgctcatctgtggtccctgatcaataccctcgccggaccctgacctatcgtgtatcccaacgttacaaaaaaagagggccatcggaggagctgtgggcaggacggctcacgatgtgacctgaggaagatgcaaggagaaaaatgaggagccccggaagagtaagagagcaccgttgctacatgtggccagtgaagtgtgcttgacgccgctggtgggtgaggaacgagtgagtcgaggaacaagggaccaagtgacgacggggacaacgcagacgattcaatgcttgtcagatccactcggacaaaaccctatttgcccggttgcgtgtccgtctgggctcttgtgcagtccctaccttgacgctaggaacgacgatgtcggaaacaggtttcttactcgctactagccaggagtgaggaaagcatcggttgctaatgatgccatcgcctcgtttgaggagcgtactcagatttatgcccgatgagcacagtcgtcattctcctccgctactcctcccctgaacaatcatgcattgagagtccaattttgtagattttgggtcgtccaagggtcaagcaattttcagcgcgtgttttatcgccaactcctcagatctcagtcgagagtgagagaggagtgtagccactttgaccaacgaatctgtgcgtcagttgatacccgcccgcacattcgacggcgacgcgatcggccaagtggacatccggtggctcgaagaatgagtcggcatcactttgttcctccacaaaccaaaatcagcgaacgcggaatcagcgaagttcgctgattccgcgaaggatctaccgtacgcccatttcaggtgtttacgctcttcggtgaacggagtaacggcgcgcgagcttgttgtgtttctcacaccattccagtggatattttcggatttgaatcacgaatcacccttgaatcgatgcatccacagcatcggttaaagggtgcgaattcataccgagccgacgagaggagcggctgttaggacccctattcggcaggcagactcacaaccagtgtacgagaaatgatccgagttcccgaatttttggaaattctcagccattgctggatgatgattgggcatgggacatgataatcgtagacgaccaccttgcgttcgacttgagtgagccaaatgacgcctgataggatttccaacaactccaagtcgtcgataagcgtattttctgcaccgatgtcgtcctcttatctgagggaggacgggcggtcgcgggtgaacgggagctcagatcaacgcgaagccaattgaagaggctcttcaccgtggcaacttcaatcaccgagagagctgactgggctgcgtagtttgaccagcacacgaagatttgtatactgatgcattcttgaccaagcagtcgaatagtgggcagtgagtagaatcgcttgaatcccaccaccgatacacagcccttcctctcacctcgagattgatttccgagggccccgttgtcttcggatagcaggcttccagtagagcctgcctgaactggtatctgtccaatatgaggtccccggaagttttctggccgatcttgtgtagagccggagtcatactgcagttcgttaagactccgagagtcgtattaggcgctcgggttagtttctatccagaacggcttgatggctcgtttgatatcagtgtcgatcggactgtcgagcaagctcgttgtggcagcaacgacaaaatgtccatcgtatgagaaactgccgacgagctcgagaactggctcacttggacgaagctgccgtcgcgtccgattctccgaggcgggaacgaatgcccccagcttcgtccgcaccaatcctgaatctacgttgctcactcgaggcgtgggacatgacgcgtggggcgtgatctggtggttacttagaagaaaatggcggtcctgcgccagagggacaacatcatctccccagaaagcagaccctactcgctgcagcttctctggtgccagctcttggggaatttctttcggtggctttggttggacagccgggtcaaacaggttacgctcgtcatcgtcacctgcgtctctagaagccgtcgtttgtggctctgcacgcttaacatggtcgtccgggctccgaaaaattcgtggatcagattcggctattactgagaggattcatggattatggtcgctgcggtagaggcgtccatggcttagagacgctctgtgtgaacctcctcatatgctcttccgggattgcctcacctcttgcggtccttttagtttcgatgtgagtgttcccaccagaagatcgttgagtggaggctctcggtcatgatcgaatgcatttccgcgatttcgcagctctcgtcgaacctaggcacaggcgagccatgtcttgtcgcccggtttgcgcatgatcgatgcattgatgtcgcggtgactagctctacatcatccacagacgctgccgtgttgagcgcaaggagttctcgtaatgcgccgatcgttcagcaaaaaactctacctgtgtcccctttgccacacccgcaaccttgagctttccgaaacgtagcgctattctgacactccgtccactgatctcttttttcggaaccgttcgttctcggattggcgaacgatcgcctcaatgtttgcccaggaaacatcagagccacggatcttcgtgttcgattcgtcggcgctcgtgttggagtcgagatcttgatttgatgacgtctctcggccgacgcatgcacataaacgaaccgataagccagatcaaatctttggagccgttggctaccttcaaaaacatccacgatggtctgtcgagttctgcgttccagttcgaactctgcggagttgggaacacaggtgcgaatggaggaacaccgtgcgatcaaagggatgccaaaggaggctcgctcgcgatccacaggaattcgttccgaacaaaaaatcacagaaaaataaccgggctcggagcgagatattgcatgcggaaaagagagtgagctcacagacgtgtaaatcgaagaagggcgaggtacgaaatctcgctcgcttcctgggcgaatagatcaagggaatcatctcccaggagatgaaattcgttgtcgttgtgaattttgactcagaacgccgcccggcgccccgcgtgtctgtgaacggcgggcgagggggaaacttctttcaacgaaatcgatttcgtgtcccgaggcgccgttgaagttacgcagctcggaaactcctccaactgcacggaattcggatcgagaacacaggcaacgaggaactctcagcgcccattgtttctgaggaacctcctctcgtcaccggatcctattcgctctacaaggccaagatctgctaccttcacaaacagcccccagagacaaacctcggttgaggggtggaacaagcccgagtcagcttcgagactggaagagagccatatatctgcgtcccagggtttgcgggagaacaagtggaaaaagtcccagtagtggagggtgtgacgggggaggggggagggggggggacctctgcaaaagacttttgacagctcaagagaaacttaccttagagtcaaatttctgtgactccgaattctcgctcacattcagcctatcctctaaactcgccgaaatcctccgatcgtttcgacattttcctccaatggtttatcgtacgtctcccgatttcgaggcagtatcggataggagatgccctcccagaattcgactcgtggaaattacttttcgccatgaatggctcttgagcggcggtgaacgcggcggagagcccaacagaatacttattgaactcgtttgattatccggttgatggggacgaccttacagcgcggcggtaggggttttcaaactgaagccatgaagctccatctcaatctttcatcaagcctcagtgtgatctgggggcggggggaagcaggggcatgcggggcggagagcgatcattagaaacgtctcccctttcctccatatccgacttctcagatcgtccatatccaacctcgaagtcctgggaggaaattctcctcttgcatctttcccgcctcttctctgctacttttccctgcgccacttcaacctgtcctgtccgagttcttctcacggcttcctgcttgtcctgtatttccttccctcttgttctcgatggcttgctttctgaaacgaaatttcgctcctaatgagttctcctctccctggctcccagttcatactgagtggttggatatgtcggtatttgaatgagtcgagggagttccctcatatcgacgcggcgagacggtctctacgattgcacgatttctgatccgcccaatctcttgttcaaatgactccgatgttggccgctctggtagtgaaggtctggcccgactgcttcattcgctcaaccgaccgagaattgggctgattcaagagcacacccgcttccccgtgtcccgggacgaggataatcgggtcgttcaggaacaagtcaccattcataagatccgcgttcgatgtgattgaattttttcccccgagaagaagacgaagtgcaagtaaactggaagggaacgacaacctcgccggcgcgatcagataggtgcgccacttgaagactactccgagtacgactcctcaggtgtctggagggtcgtgaacccaagctgggtgcgaaactccgtcccggccttcgaggtaaaccaaacacggctgagtgtatgatgacagggtggccctttctctcagccacttttgctttgcctccagctacaggccaacaatggctgcggcgacacggggggtagaagagacgggatattcgctgtcagctctggagggattcggctcgttcaacttcgaatggtacctcggaattcgacttcgtcttcagcccgtcggcttcagcaagccgaggggcgagcgggcggtctctgctgttgtatttctcgagggaatcggtcgctacctcggtcgctggcagccaactcgagcagcgagttggggtgaatttatggccgacggtagaatcagccggctgcgtggccgagcgcgggtctggcctgggtagcgtgccttgtgggctgaacggcggcggcgtggtgagtagcgaacaatgccgacgcgaggaccaaaagcgaaagagaccgagtagtaagttcgatgaggaggcagcggtggacggcaaagagacccgtcgctgggtcggaggccagttgagcgggcggttgaactcgagttcggctgacgacgaaattcgcttatttctttgattggaaccggttcgagacaaattccgaaacttttcttatagagcggctagtcaagcggccaggccgtcaagcagggccgggggacagtgggccgagtaccccacaaacatgcccaaggcaatccgaaagactttcgattcgagaggggatagggctcagtgagggggggaagagaggcctatgagcgagtttgtcgagagagagggtgattttgctacaagggtcatcggagatttcggagaggagagacggaaaggacagctgtatggaatggaaccgatggaaactgggagaatagaactctaatggcagggggaataggagcagatccgaatccctggtcggagattcccgcatgctccagctcagaatccgaatctcccggtttccgatgcaggacgcggattgacgacaacatctccatcgttttgtgtcatctcagcgcaccactaaacgtcgttgcttgcagcgatgtgactgtgttgactctgtgctctcgcgtagagaaagaagagagaggaagagctactaattcgttaagtgcttgttcccccagacactctgtatctcgccccgctcatccggttgagaatgaaacgaaaagggagagtgcaagaggcttgtttgcctgctcgcttgcttttgcagcaaacgcatttcatgcaaatccgccgaatgcgctcgtctccgcagccatctacccgcgagacagagtgacacacagatggacgcagaggcgggggaaccagggaaacgacgcagcaaatataaggcactctcccgaaaagacgcgtttccgggaacatccgtttcgggaacgtcacactcctttaccgcaggtttgatgtaaatgggaagagacgcatctcgtgagtatcgtctagaattaggcccgaacagcataaatgtagcacacacagtacgtttatcgagatgatttcgcaagctccagtcgaatcaaactgccaacacttttctctcagaatcgtttatcctttctttctgatctgaaaatcgtcgaaatcgagcactggtcgtgataacgagctagttcctcatatctccatccatgatttatattcagcgaggtcggaacggaatcttccaccaagaacggcattccacaatccgagaccggcggctgaagggatggtcttcgagacgtcgcacgccctgagaagggccgccgtctgttagatatggaaatatgcttcggggagacccactggacgaaagatctcctcggcagccacagtcgccttcatatcttgctcatgttcgctcagcctgactcgccccagcagctgccggtagttgtgtcactctgtattcctctctatcgctttctatttttctccgcctagacaccgcactcactcactgcctagcacatccgccgcgctctacagagatcagagaagcttaactcgtcaacgcaggctgattcacttcactactgatcgaagtttccctctgtccctgtctctgtgaaagtcgatgagtgcccacctttgagaatgaaaactccccaaatccatccgctccgcatggaacgggcgcgcggagagacgaacacgagctcggaacgagttctgaaacagagcggaattcggccatccgagccatggaaccttgacgtggcaaccaacagaacaactcgttaactagaattaaccactaagcgttttctccctctcatgtaagcttcatcggcggtccgcgaggtatcgaactcaacgatttttttcatgcgctgaacaggttagggactgtaattcaatacagctcacgctctggttttcctaccgagacaattggccggatcaaaaggtcttccggatcgcaaagataactttgcggcggtaccacccgtcactgtgcagatgtcgtggagctcgctttgaccgctcagtcagcccgttgatatgttgggttttcggagcgatcattgctccaggatgctcgcgtaacgccgcgcctcttcgctatcggattcgcgcaaagatgaaaggaagtgaagcctcgagatagattcagatcgtcgtcatccgggaaaattgttccgcaggacctcccggaggatacgaggaagcttatctgtctcgatttccaaaacgagatgatgtccgggtacgttgactcttccaacagagatttccctggaacaatcgtaactcatagcaggtggtcgttccgaaaatcgagccgtcgctatcattcatgatttctccgattcgcccgctcagataaacgtcagtttccgtgttttgattgggccaagaacgagaatcgatggtatgcgactattccgattcatgagagtcatatcgagccgcaaccttgagactcgtgatacgacattggtgtcaatctatccctgtcgccccgattccgtccccataatttcgagctccacactgtgtttcagccgagctctcgccgagctccaatcgatcgcacttcgatgtaaagttctccagctgtcccggattccgaggctctttcggcaccctgggagactgcgaggatcgcttcgaacagcggctcctgccctggtgattataaagatcgatttggtgggcgtctcagtcacaacatatcatttcggtgcagatacacaccaggcgttgcatactgagtcgtgagctaacgtctgctgcgagctgtcatattcctcaccggttctcttcttgctcttctcttcgggccagacgagatgccgagggttcggtggagtgagttcggaagattgagagcttctgcgcgtaacgatgacacggcagtcccgactccgggtacgcagtgcatatggcgaacagcgttccgagtgaatgttcgcattatagttcccgaggccgggcccgaccgagtgggagattccgacaaggaacgaggtcaaagtcgagtgatcgcagaggtattccttaccaaggagtcggacctgcttcctgatcgaagtcgatgacgagtttccggccccgctacgatcccgtccaggtgttcggcgtcgatgctatcccgcggatcgcgaccgggtcgatcgctcgaaaaattccgatcgcctggttgaaatagcgagggacgccgaacgcacatgcgacaccataataacttatcagaaatacccggatccgatgagtgatcagtgcctgacgcggatagttccaaagtcttctgcagcccacgctgagattattgatttatcggactacgaatcaagagttacaccagcaaaaaagtcgaatgagccgcgaccgtttgtgagcgttctcctgcctccttttctcttcgagatattcagcccggcttagcacaatgatccgattggacgggggcgagctgatcgatgagtctgacccattcgaacgtcgtactcgtctatagagaggagggaaaaaagaaggcgatcgtctcctcgggaaacctagcggccgccgccaggcgggggaccggccatccgacccagctgatgataaatgtacgtatgtattatatatacggtacgccatcacttatacaatgcatctcatcccaataattgttttgatgggggatctactactatcgccaccggagacgcatcatccccacatggcgaggcattgtcgctccgacgttgacgcgttccgatcaacaccgaaatcaagatatattcaaaaagaaaatccacaactcgatgaagggcgttcgttcttattctctccaggccgattcctcgcagaacaccacagctgtcccgcaacattcagtctgatttcatagcccgatgggaacaccgaaggagcgaacgccgtttcgcagagctccactgccgctcgcaatagaaatcgagagcgactggaagaggattcgtggtcagtcgagcgtacaactcgggttcatcggcatcgttgatcgctgagccgctgaaacgtccgctccagatcacttgatgaaattgagcttctcaaagagttaactcgactggtctccgagtaactcgatcggaaccgagcgactcacatcaagttggagccatcaagtccggctcgcgaaaacgctgctgtcgaaaaacggataagaggcctggagagtccaacgggtcaaaccgaacggtgggctgtctgaccttcccacttgaacgctcattaaagtgcaatgcctccagagggtcgtctgcatgtttttaagcgttcactgacaaacattgtgagcaagggagagctcccggccgttttcgaggggttcggagttgaatggtcttgagacccctcgcaggtaggaaataccggaaagcccgagcgataactagctggacatcctattcaacgcccaccaagggaatccgagcgcaagatagcgcagctcggtgagggcccccgaacaggaaatgtcccaagtcggagagaaaactaactgagaaagtcagcataaaaaagagttaacatctcccgtggggccaatcaacaacatggacacaagctacgaccgtttgacacctcagctgtgctggcatgccttgagcgtggctccctttccctccggcgactcaagttcttgggcttcctcctcaggagttcacgtacatctcttcactcggagttatatacgcgtgctcccccattggggacgtcaacggcgagcggggtgatcgtgtctagtgatgttaagggcccgaaaagcaccgggagttgtgcatcatttgaggcgtagaacctaagtaaaacacaataattttagacaaagtcagagctcggataggggcgtgaccttaaaaatgagcattctcgatcgttttttgtgctattgtgtttcactgactggatatttacgggacggatttcgttttgacaacgtttgttaccacattaccgtctggagggccgagggcattccctcaaacatgatcattcccacaaccgctgggcccgttctcggaatcagagcgtcaaggttaataatcgaaacgcttggcgctcgcgctctgactttccacgagagtctttcgcacgatttccgtccgcacccgtaaactgcggacacgaaggccgatatgaagaaaaaattccgtgcccttcttcctggatcgagttcctcaattaatcttggataggcgggcgactgtcttgcaagcaattccttaatactaagcaaggcctcaccggggtggcgacgaggaaaatcttccgtagtacggaataagatacggtcggggttcagctgtacatgagttccaaacgttgagaacgagaccgatattgctggtagatagcttggattagacttcctcctttgacacgctaatctgagattatatttggtgtcatgaacttcgcaaagggtggggtctcttgaggccggctctcaggttcgaggagacgtaaccaggggaagcaattttctgaaccggactctttcttaacgcaggaacgatgatggtcttggttcccactgagctgaaaaggaacgctcgctcgcttccaacaccggttggcgtagtgattcgggcatgtactacagtatctccatgaaaatacactgttattattatcatggagtccgctgttcgagcgtagcggacgacggtggccgtgccttaaagacagtcggacccgcttagtagagaagcgcataagaacggaacccgtttagaagagacagattccgacccctcgacttcgttcccataggaaaaactcgtttcgcaagaagctcgcatagaagagaaaactcgcggaagagagacccaatctggagccctttcctataagatcccatggaaaggaaatctcgcatgaggaattcggtcggatatcagatgaaatcgacagaggttcgagggttttctgtccaacccgagtgaggtgaagtctcggggaatcatgttgtcgctcctcttctgatgctactagggatggaacagtctcaggcagactacctcaggtgggaggaatggctcaggtctagaggatctagtctaacacagagcgggcatcccagaagtcttccgtaaggattaagttgaaccaagggatctggaacgactctatgttgcctcatgtttgatgacgtaagacggtgcttggaaaaatggctcacctgtacctccaaaaacatggtactcatagcagggaaactcggactatgagagacttcacctcgttcctcgaggagtgttttgtgagcgggttcgaaagtcttacctacctctacttctcaccttgtgaagccgaccaggaatctctattggtatttcgttcaaaaacaaaactcatgaatgtgaggagaaccctgaatcccttgaatctcaccgcggcaagcaaaggacatgggttagggtcatccgtctgtttgagtcgttaattaagttttgaacctttttattcccttcagaatccgtcccggcctcgaggaaacatccaagcgatgcagttgacgtttgatgtcagtggctccccagggttcggctatgaagctgaatagcgagggtttcgaccacgttcggggtgggtttgctgtctcagccgcggtggccccttttgctgctgctgattccgcttctgctggtatccccgcaaggaatgtcgtcgagctggtattgcgacccgcatgcatgtgttacagtctcctcgtatgacgaagttatgcaaattacgctccttttatggttaccaacagccgtgtcatggcactgaaaccgaatgtcaacgaggaacgactcgcatcaaagatctccagcatcggagtttccactccatcagagtcggtcacggtgccgacagacaacagaatgaagccggtggttaacgaggcgacacacctttttaaatatagacgtcttactcgtccctaatgattcggagatgacgcacgcctgcagaatacggctgtgctatttcagagcgccacgacttagatacttttcagagagcgctccgaaggtcctgtctcgcctggatgtgggtcttgggcttaagcttgaactgaggacgttagattcggccatgactgcgttcggaggctccccactggacacatgagcgagttcgaggttggcccgctcgaccagacggcttggagctattttatcattgatagatttcgctagaatgagatatggcgcgaaaatcgatgggttccgcggagcagacatgggagttgttgccaataggtctcccatgaaagtcctgcagtgggctcaacatctcgggtaatggctcagctggagaccagcgagagagggagaaatcacgaacgagacgcaggggttttcgtgagaagtaggtaacaaacaagtgaagagattagattcagaaccgctagtcagctttcgctctccgttaccgcaaaactgcgctccagttcaactacataggagctcgatcgagctccttctttcgagtagaggaagccgtgagccttccgagatagcgctggccacagctaagagccagtactaaacatccaatcggctgttttcaatgccgcacgcgttgaagctgcaagtggagccgcgcgggttggaggtcgaacacggggcgtatcgatccccgccctaatcacgagctgtttatcgatacacgcttcggtagcttatcggcgtcggaaaaatctacccacccgccatccatccatccatccaaacagaccgaccgatcgtccagccgccccgcgaacggatacccggcatattacttactccccgttgctgtctcgctcccgcaaaagcatttcgtattcgtgacgcgtcagctcctcctttgccgggtgcagtctccgggccagccggctcccgagcgcgtctggtttttggcctcgactcgctcgttcgttcggtcgacctcctcgttcgggaatttttcgtttctactcacgtcctttatttatcctagttgtatcacctatgcaaactccagtttttacaagttttctcttggacaccttcgtttcgcctcgtcaccatcgtctcggtctcgcctccacaacgttcctgtctcgcgcttctcatgatgcttctcggaagtttcaacgacctgtttccgaatgggtcctgcgcacgttatgatacttatcggagcagacgcccttctcaccgaacatcctggaaacttggcgtcgacgaccgctatacctgtttcttacggagggaattccaaggacatgaaactagccggcgcgcgtgattacatgcatcttgtgttcgggccatgcgtttccgagaatgacaggaagtgttcggaactcgaccatgacacgatggttcgcgattacactccgaattctgtcggactccggtggaaccgcatttctcgaagaacttccctgcgtagctttctttctgacttcatctctcaacggaacggggaggggtgcggattttgacctggggaccctcgacggtggaccggcgagaaagttaagaagctgcgtctgtcgaggtgggcgcgccggttaatctccagagtgaatggcgcgcgcgcggtttttttccgcatattttgaggatttcaaaagaattgttcgctcattgaggacgtctttcagcaccaagtcagccaccctgaccatgcgacaggcagcgcggtgccagcgtgtgggtgcagcgagccagggaccggtctcgagtgggaacagctgacgagtccattcgcgcgagaagggtcaaagttctccgaatatttttcccatctgcgaacgattttcgaatccagtcgtgttgcactgctgagcgaattcgttgacagaactcccggacggaacagctgtagcggaaagcttccgtgatcgccggggctccgtacggtattccccgtatctgcatcgagttcctggattcttgcagtatggttccgaacggagacgcaactcaaaccgggcggacagacggacggtcggatagacccccctcgagggaatttctgtcgcctcgaaaccacggagagcgttttccgtcgctgcggagtcgcatcgggccagctcgagtcttctcagctatgcgtgtctgcccccggctaagtggcggccaggagtgaatcatgaacgcgctcagatcttcgagcatacaatatggtacatccaacgccatccggccgttcgcacactgttgaggtgagcagcggtccattacgatgcgagcaaagttattccgtcgcgagtgtaaagagaattagcctaagaaacatttctgaccaattaggcgcgtgcactacacgcgcgaacaggacttgcgctgatggtgtccctcgacgggttttctgtcgagcgccttgacaatgagacaggcattattcacacacacacacaggctgcaaactttcctccctgccgaccataacccaatgagggcaagaagttctacgaacgggattgcagagttaccgtgcgaaaggagttaaggctcacggaacgaaacagttcctccggatcctccgaacaatgtactcacggagggaccggtgggagggtatcagttgtcacacccgtttcctgttctgttcggcgaggattcagcggagaggatcctcgatggctcgaggaagaagtcggaaagcggggcatcagaggtcgggtcggcctctgacggcacaaacatcgcaaagtaggaaaccgaaaacgatccctcagatccggggaccgtgatgggtttgaatctcaaactatcgagcaacgaatgagctctctcatcgtatcgtttacgctccgtcgaatgttggagggacagactcagaattcataaccatcggcttgtcttgctcgacgttcagcggattcgagcggcgctcccgtcgcgacgattagattcagacgcgtgtgttccgttcatccatgtgtcctgaaggaaaaaaactgtttttctccttcctgggcatttatacttttcggtcactttcctcggcggcccgttcgtctcctccttgctataaattcgccgccaggtctaatcccctggagaaatatcgaggcttgccaacgattcgaacgaccagccggaccgcgagctgacagccaggcggcggggtggtgacggcacgtcgacagaactgggcccacaacaaatccacgcaattggacacagtcgaagctttggacgcccctgttactggtcagggacggagctgataccgatttgccgactcgaagcatattgcctcattcaagttcctccgtcgaaggtgaatcgaaagccagcctggtgtacgtgattctcatcggaacggggtcaatgaaccctctccggatggaaaaacttgtcttacccgagtccgaactttcttcgatcggggaacgaggctccgtgtacttgcctccgagaggagcgggagaagagggctctggcccccgagaactatccgatggctcgatgattagagacgagtatgatatgtatgaaagcagtatatctcgagccgtaaataacttctgtgaggacagatgttactcatcgatcggtcagacggcggggaggaagaagtgttggggaagcgaatgaagagagggagagccgtctacttgaacagctgaggagagttctcattcctacgctgcagattcactcgatttctccgggactcaaccaaactccctcataccgctagaccgagggcaggaggaatgctgccgcgactaaggccccggtgcgtggattgcgattgagagcaagtcacagacggtgggagagatgaggaaaaataattgagtgcaaatccaacgcccgtccgagcgtggtcatagttggttcagattttggacttcatatctgacccgccgcccgggggcttgccttttaggcgagaaataaacctcaaaaactgagcggggttgattgacttctcggaggacttcctctggaaaccgctttgaaaaaaaaaactccggactcactgagatctccgggagctactgtaaacctcccgaaagacgatccgaggaaagcctcggtggctgatgcggaccgagtacgtcgacatctcggtttgcctgatggcgcttgaaggtagcagactcaggccgggattgctttgattcccgctcatcagcaatcaactcgaatgcgagaacggcgtccctgggcccgaacgacgtaggtcgcatccaacatcgagctcacacggaagagaaacagcgagcgtctctaattcgcgctttggtcttcgtctattagcagttgccgcgaacgttactttggttcccgctggtgatccagccgtctccccgatactttgccgtccctcgcccgcttgggtatatgatgaacagagctataaatagctccataagaagagaaagagtgggttgaagcgcggagtaaatgtctccctagcatgagctcaaggattccttctgttgagtattccccgctgcttttgatttttcattgctctcgccagtcaactttccagcgagaccgttatgaagtgaattgcctctgagcagcgaaatgagcactttcgcgtgattcgatcagtccgcgattgagagcccatggattctgctccaccgttccctttttttgttgagtggctttgctccactctcccgagaacttcgagcagcgtctttggacaagcggacagcaggaaaaaaaattgtacagtggaaacgcagcgaggcagaaagacatgtctgctgtttggcaaagcgtgcgtctcggccacaaacagcttcctcgctgggggtgaagtacagcaaaactaacaataaaccggaacttctcccggaagttgctccgggtggggagttaagccgagctgcccgttcatcatcaaccgcggtcaagagattatgagaggagagttagcggtacgccgacggcggctgcgatacacaagtggaacccaccgcaagaaataaagttagagcgtcggattcctcacggggaggaaggaacgccaaccgaaagaagctgctgcgacacgcgaactgccaccggtgcgagggcgcgagggggcatatcggtggcctctgcagatttatatttagcgttagacgtcggcgcacggctgctcattcccgcggtgaatatttcacgagtgaatatttcgatggagtcggtcaccgacaaacacgcgggtactcggaccgacgggcaggtaaacacagagggagaggaggagttcgggcgggggctctgagtctcggcttgattccgcgcgatgcgccagccgttccgcggatcctcatcggttgcgcatcgctgagttccttggcagcatgcgcacacgagagctcgcgcggtcattcctcgattcaggtgttacgttccggcggccgaacgcggtccaagtcagcgggacaggttcttccatgactgttgatgacgattgagcggctgttcaatatttcaggcgagagttcacagcaggaagagccagacgcatggtgagcgtggacagaagtcccgaaatctgtcggagtcaggacactccccgacccagcgctcagtgtcgaccgatgttgccaaccctccgattcattgcgtggtggatccttcctgtgcttggaaatcactaggagtcctgattcgtaccccgaatggtcgggaaacctgaacgttctcgctctgtgccctgcaagtcgaagccgagaatattcgagatcacctggaaacgtaattgacatcgccgcgcacagccttatggatcatgaaggcgctcatccaaaatgctcgacttgaaggtcccgacacgaattttcactccggagctcacccgctgcgtcccgagctcggagatttgaacctcggtttgggatgctaatcgttcgccgccatcgctgtcgtggatgcccgactcgattcaactttgagcacaatctccgacctgctatcgagcgggatcggagacaacgcatcgaggaagacagaggagaccgatcgctgccagttagtgggggaggaaactctggccgtcgtcttggaaaagtgtgtttcaagcgagcgagaagtaatgtattcggagtcacgcgcgcgcgactcttcaccaccgccagcagcagcgccatgaccgcgttcattataggctagacggttcggtgccgacaaatcccgaagattttccctgtcaccgagccgattggagcgagtctccttccgacgatcagcacatgaatcgatcccatcaaatccgaggatcatgagaacaaaaatgccaatcgtcgaaccgcaatgccgatggtgttttagagtctcgagagctggggcgagagcgtagcgaaaccgcggcaaaacaagaaaattgagggatgctcgcggtgatggaagtggaaaggttcgaggatgtgaaagcaatggatgcggatgaacttttggcttttgttcggcgttttatgatcttgtcatggttggcccgcggaggcgacggcagtttttttttttgcgagacttttgcgggaagcctcccaatgtcttgtcctgtcacgcgcaacttggtatgcggtgctcgttgcggcaaatcctgctcttgggcttccgttcgctatcgttctcgtactgccgatgttttcgggaggacagcagggcagaaggggtaatgggagatgtagctgagaggcgtcgaacgaaggccaagaggcgggggcgcggatttttaaattcaccctcgacaacattttgctgattgtcgcaccccggcgaggcgagcaaccgcaggcagtttcattgtctttgttgctctccaccgcgttcggctgaagccgtgatcggatactcgcgaccctcgaaattttcgtctcacgtcgttctcattggcccgttctcgcgtttccggatgcttccggtatcaagggcagagagttcaccacgaatcgaggttcggtggggtttgggattcctcgcacattcttcagcgctctccgccaccgcaacgggtcccaacttgagtgacatcagggagaaatgtgactaggattctcaccccggctctggacatccttccgttccattcgaacaccggtgtcacgcattcaattctccgtagaccgaaacaaccagatggaagactcagaagcgctctctgcacgcagggtgcgaagttcgtgcaagttgttcgcacgttggggagcatgcagggtataggttcggaaataaacttgagatcaatgagcgttagctcgctgccgagaggtaagagtttgctcagctgcgaagagaaaaggaaactctttcgtcgctccacggagaggagcgggatagatgctcccgcggagctgatcccagggatccttcctccgctttcttccacctcagcttcgcaatcgataatattggacggttcatgtgaatatcgaatctcgaaggaaacaaaaagcgttcagctcctcacagctgctctgtgagcattaattcacgactcttggtcttttctttgcatccttcgacaacgctcctccggatccccgacctgccgagcaggtcctcgaaaccgagtgtcttccgtcgttgtttgtcgcgttttctcaagtggcaatcgcccttccccaaacgacgaccctcctcccgcatagccctcgcccaaatctcttcccgctcgaatctcacgtgcagagcgcgggagctcttcaggaggatgaggagattcgagagaatgaagtcaggacaacctgtctgtaagctgacgaagccgtggctttgtttggattcgtgagatttgacgtgcgacgaagggttgggctatcctgccccacaatgtgaacagatagcgttacggaaagtgtcaaacatgcgtcagcccaggatattaacatggacacttgaatggaaccggtcatgacgtgacggagtcgacgacagccaccacaatgacgacgagcattccgatcagggtcgtcctcttcatcctcgtggggtctactctcttggagggagttccagaatgtgatttcaattcaatgtgcaattgtaaccacgcaatggttacctgcgttggtctcaggatattttccctgaaaggtgagttccaagacggtaggcatcccaacacatcccttctggatcgaaaacccatgaggagtgttttcttccaggagtcggaagttccatagcgaatggaaatgaaacaaataggaaaaacaggtcgctctccattcacgggaagctatatatagtgttccctccaccccctagagttctgaaagtccgcgttctcgattcgcgcgtttgtgcaataccgatatcgagagtagagaagcgttttatccaaagcagcggtccaatgcacccgctcccctgtgcgattcggtccgaacattttttgagatactgagagctctggttctcaatctggctgtcagcgcatccctgagtcctctgaagtgggactgggaacctccgcagatttgggaagtttaagaacaactgactcgagagctttttgcgggcttcgcgagaatcactgctgttccaccgaaactcatctttccgatgtccttgttcctatgcggcccttggcccctgatgaagatctcaacttctacgaaacaagtctccgacgtattttaatggcgaccaggaaacttcttgtatctccgtccttgatttgaatacttgaaagaaccttgtcagagatgcatggcaccggtgtcagctagctccttttgacttcccgattgcgttatctcgaggtgtccgccaatggaatcatgtcaaccggcccggggggagcgcgtgagagattcgccgagaggccactgtttgggaagcgcgtaacgaatcaccccagtttttacgccattgctccaaggagtccattcgttcttcactgaacttcaggagctctaatctctcgcttaaatgtctgccgcctgacgagctacagtaaaagttgccgtcggccttcctctcgaatccctgattgggttcccagttttccgtcccaacctcgttgacacataaagaatgggaaatgaattttgtgtcggggcgtctagtgcagtctgagacgcggggcctgaacctatttcccgcgcagatttaattgttgtcgggttagctgagattcgcttggcgctgaacaagcgcttcaggctctgcacccgtatccttaccagccttgtatgggtttatcgtcctgaatgtatctctcgacagtgctctctttttctctgtctagtagccgttgggtcgttcacgtgtcgcttgtgttgttaaaagttttgtaatgaaatttaccaatttgtgtgtcgtcacctagcacccacgcgggtgggcgagcgggtgggcagccggcctctcgacccggggctcgcgccatttcccccgagggaccggtacacttgcccctctctctctctctgttagacggcattcactcctgctgaagagccgtccaagcgttcgttcgtgcatcaagtcactccgtgcccaccttcatcgaccaccaatcattcaaaacggagtccgaagccttccgcatcatgtcctccccctcgaagcctccccagttctgatctatccggccatgagtgatcgatgagtgttgtcagttttcccgtccggaggtttccagggctccttgagctctaggatgcttctccggagctcgggtccccacttgccgggagtaaaggaatactcgaacatgggagagatgagctgtaaaggagcagtgagaagtcctcctgaagtacacctggagtcatcaagtgggaggccgtttgaaatgcattaagtcatcacccgaccatcaccaaaaaccaccgacgaactattaccgtacgaggcttcataaaatggtcctgtaatgaatgtgggcttaaaatacgagcacgctcgtttcgatactctgcagagagttcggctcctcgggactcagactttctcctcgacccgccggctcctccatttcgttcattcggtctctcacaaggtgttcgatacgagctttcagccttgtctcgctgcaaaacgaactataaaacactgtaaacgacgtaatttcaaggttctaaaaacaccggctcgtcctctacaccagaacgctactgtgggtgcttggtctagtttccctcggttcgtgtccaggtgaccagtattccggagagtgtgatggcttccccgctggaatgtaatcgcgaaaactcgaaacaaacgtagccacgtcgccttcaatgaggcatcagcagaaatttgaattgcgcgttgtcagcgcgcaccgctatgcagatagcccaagtctcccgtgagaatgacgcagagaattcggagagggaaaacgaaagatgggccacagagaaagccaagaagggatctcgaatcttaggaatttcgtttgccaactgtctgcatcctcccggagattctttcagccggcgatatcgacctgactttcgacctgaatgtctgttcaaagccgtttctcactcgctgagttttgtagaactcgggagtcgcacgggatcaaggcacgcgacgggagcggaggacccttctttacatcgaatgtcactttgtttaagccttccctccgacgccttcgtcctcccccggacttccatgcaatgaatcgccaatgaaaacaaagctcgaggattcttcgcacactgctcccagaagacaatctcgagctcgttatggcggtggctactcaaccctggaggttcaatcggttcccgcatgattttcgcttggattatcctccttcgatcgattttctcacacaacatgcggcttccggccacccggcgggccgcgagtccgcgtttcgatgctctcgagcccagatcgccttcgtcgctctgattcgcttctctcccgtttcagacattttcacccgagcagaattcacggagaagaaaaaccaattcagccaagtcgtcgtgagccggtcgggtctgctgcgcctggagtggacgccctcggacatgataacgttgagcttgccgaaaaactccatctacgacctgacgtcggacgcgtttcatggaaacgaactctcgctctccagtctggatctcagcgacaaccggctggcctcgctccccgacatgggttcactaaaagctcttcagtggctgaatttacagcacaacgatttcaccgaggttccgatgggcctccggaacaccaacgtctcgacgttgtttttgtccggaaacggaatacgatcaatctctgcggaggccctgccggcttccctggttacgcttgacctggacgcaaaccagattctcgcaatagagggccaccctttcccgaaagggatgcgcgccctgaatctcggcaataacatcataaccgagattcctgtgcactcgttccacatgctggcgagtttggagcgtctgtccctcagtaacaacgtcttcaagagcgcacctggccgatggcgtctcccgacctccgttcagattctggacctgtcgcatggttctctacagcagctggagaccacctgcatcggtctcgaaagtggcagctgtggccagctgcaggcgcttcacttggaatacaatttcatttccgcagtaaacgaaaagtctttcgagggcatgcaactgcggaaactttatctcaactctaaccgtctgatgcagcttcccgactcgttgttcaagggtaggttggagaatttttcgaggggagtttgtcttgcggagcactgtcagatcagcgatggggtcgagggacagggcgaattttcggggaatctgactgggaattcggtgaatattcggaaggaggagggggggggggttcccagaatgttcctcgcgttgtcttgaactggtgtttcttggcctccttgaatgggattgacgcccgaactttttttgctcaaacgctcctcccgggaacattaacggaatctacaggtcattgaatatcgaatgaggtcgctcctcggcaacgatactggggtcggggacacggcagagggagcagcgtggaaaatatgggatccgagggagacggagcaacggagaattttcggaaggtcgaagcgttctaactaggatcttctctttcgtcgtagctacgatagcatctactctactcgtgttggacctcagtgagaaccagttctccgcgttaccgccgtgcatttcggatctcaacaacctgaccgtgttgagcctcagagggaatttcctgacatcgttcgaacccacgcccgtttcactgtttctcagaacacttcaggtcagcatagaaagtaaaggatcggtagaactcttcgctgaaaagcgtgatacctccgaagagaatccggttctgagggggaatgagaacggtccactctgcatagggggatcggggcggccaacatgggaacgccgtgggaacgactcccgggggcggagagaaaacttgggaagttcgaggagcatctgagttgaatgatgaagccgtgaaatccgagagaattgcggaggatttcgatggaacccgggggcgaataggcccccgcgctctcgcggtcgcgattcctatcccggactggggctccatgagtgacgttcagcatggaacggagcacgttttcgcagacagcacgtgtacgcagaagggcgttatcatcacccgatttgagcgggttcaacggtcttgttttagttgcggaagtctgaaaaacacccaaatatcagctgttggccatgccacggattcggaaggacatacaaacaggtttaggtctcagagtgccatatttctcaaacagctggatcactcaatcgtgttctttctctgaatcgcttgcaggttttggacctctcctacaatcagttgtcgtcggtgccaaccatcctcagctcaaccagcggactgctgcggttgagcctgcaggccaattcgattgaacgactgtcgccgaaggatttcacgaagtggtcatcaacgctccggagtctcagtctttcaaacaacgccataaaagtgctgccgaaacattcgctgaagcatctggtgaacctgaaagagctgaaactgtctttcaacaacatccagttttacgacgtccaggcgttcgagaacctcgacaagctgcaggtgctcgagatgtcctcggcgttggtcagcgacgtcgccgtccggaatattcacaaactgctcgcccccctgaagaatctcagatccctccaggtggactacaatcgaatcttccaaacgcagcctttcaccgacaacgtggcaaacctcgacctcgaaggcaacgacctgaacacgatcccacagataagctcgagctcgaagatgtcacgtctgtctctaagttacaacagcatccattatttgaagacgtcggtgttgagaaacgtgtcgtccctcgaacaagtgattctgatcgggaacccgctgcgcgaactcgagtcggaagccttttccgagctgcgagccttggttagcgtcatattgtcctcgaaccggatccggagcattcagaggtcggcgttttcgaacttgccgatgctgcaacggctgcacctagataacaacctgatacagcacctgaacctggacatactgcgcgacagtggcaaccggcttttcttgaacgcctccaacaaccagatccagagcgttttcaccgaggacgagaacagaaccatcgacgtacggatactagacctgtcgaacaatcggatcgagaggattccccgaggagcctgggggaagatgccgcgcctggtccagctcgttgcctcgaagaaccgaatttccgaagtggagcgctccctccaggagctgcgcagcctcacagtggtggacttctcggaaaaccgtcttagcagttcggcggtactaaatttaagtcggatcgccccagcgctcgagatgctcaatttgagaggcaacggtctcgagtcgttcctctcgcccgagcactatgtgaccaacgctcgtcactgggcagcgctccgagtcctggatttgtccaggaaccgtctcctgcgcctcgacagcctaccgacctctctgcagatgctcaacgtgtccttcaatccgctgaaagaactcccggcggagaatcgcacggccctgaccaacctcgatctcacggagaccgggatccattcgatgtcgagcttcgagaatttccatcagttacaggttctcaatatctcgcagctcgtcctccagtcgggcaacctctcaacgagaacgcttccgcgagatctcgtcatattggacgcgtccgccaccaatgtgaactccatcgagctcgaaggactaagactggtcgagctcgatctctccaatacgacgtctacgacgcgttatgtcgtgaacaccccgatgctccgcagcatagatttgtcgtataatgaggttcgcaatctgagttcgctgctgagagctctttcggccgagcagctccgcgagctcaaccttgaagggaacctgatcgacaaaattcacgccaacctctggcgcaagttgcctcatttggcgaagctgaacctcaactcgaacccgatagagactctcaccctgcactcgttcaaaggacttctacatctgaacgagctcgacatgcggaacctgagcctgactcatctcgactcccgctgtcttcaaagcctcaggtcagtaggtgatgacgggcagacacccgctggtggggctctatcgatcatcgtgtcgctgttttcacgacagccacagacgtaatcgcggatgtatgtacgaccgggctcaggccacaactaattgaccgattgggcgtccctcgtaatgaaatcactatacgttctcacgaacgtggctgcagtcacacgctctcaacagttttagagatctgtcacagagatggaacctctgggatgaaaaaaaaaatagattcaccgctctctcacattcgattctgcccgcatcgttcttcttgcccggtcggccgccgctccgccagccatacatcaattccgtcgggtcaatctcgagaagaacgaggaggtgttttacgttggaccgctttgcagagcactggcgtctctcaagctgtcgacatataacaaaggcatcaggtccctgcgattgcaagaactgttgtcggactctctggcgcttcgtcaggtgaccgttgaagtggaagaacccgtattgtcgtaccaactgcagtgggcgttcgccacttcgaagctgcgcgaactccagataacaggtatgtgtatgcatcagcgcaaccatcaaacgagggcttctgggagtggctctgaacgcaaccgacgcggaaccatattctgtgccatgaatacttcgatgaatgcaaaatacggagctgtaactcccggaagagcccgcgaaccactttcttgcaaagtgccacaaaccgtgaatatttaacgttgactagatacatctgctttgccatccgatgaattcgagcagttcttccgcatagcattcgctgccttcaactcagtcggaaacttggggcggttgagaacaacgcacggaaattccccgattttctcccctcatggaagttgttctcctggacgggggttccgttttagtggaggtccatgcggaaggacgtttcaggttgctcggtcacactcagaattgagggccccgtatgacggatgtgagtgtacgacctcctgtcgaggggttcgaccgtggtggcgcaaaagcgtcgcctcagtgtgcattgagagctctacgaaacaatcgggggtctatcgaggaaaactcacatagccgtcagggagatcgaaggacggaccagcagggaacgtcgagtactcgacctgaagaagcagggacgggcctgagaaaaccgtcctgcgtgtcttcttctttgtatatctgaattccgcgccactgctgcgacgacatccgagtagagccgagaagcggcggcaggaaagcaaaagcacgagccgagcgaagaggctggggagaggggggggggctgccccgaccgtcgcatcgcgggcgccgaccagcggagaagcaggtgcttctcctcactcggtcgaatcacagattccttcggtgtttggttgtatcgtcgacaactttgtcgacggggggcgtttacggccttctgacggccgaccgacccaccggtcgaccgaacggtcgggtgcccggtcgactggtccgcaataagtgccaataagagaatattgctctgacagtctttgttactgacaggatcgtcgctccgctccattctaccggacgctttcctcggcctggagaacatgcacgagcttgtccttcgcatccgacacacaagcgtcacagaacttccggatggccttctcaggtttgtgagattggaacgaaacgaagaagcaccacggcggtggattggaacacgtgcgaggagggagtcggcgctcccgccaattgctcgtgcgatgatagatacacgtcgggccgtgtagtgtctgcattcgcgtcgcaattccaggcgtgccctccctcacaagctcgttggaagacctgggaacgctatctctttttatttcgaacacgatatccatctcgtgactctttctttgcagatacctgacggacgtacgctttttgacgctggacctgcgatcgaatcagctgcaaagcatttcgcctcgcgtgctcgaatcgaaacgaatgtcctactctaagggaacgcagttcctcgcaggtaagtcttgtctcgtagacaacggagcagagaagctccgatgattcaagacagtgtgaatgagccggggaggggaaagtagctcctcattcaagaaacctcgctagatatggagaggattcatcgcattccgtttcttctcttcgtcgtctccttggcttcgagctcgtcccaagctgctcgaggggctgaacggctcgactcgaccggatctcgttctgatcgtcttcccgagatcaccgacgagagggacgtccgtttttcctcgcagagcgagctccaaaaaccgacctcagagtctccatgcagagctttccattctcgcgcattgaactcgctccatgtgcgctctctcccggtactctgcgatgctcgtttgcgagcctttctttccttcaaattttttcctctccaaccgaagccccccccccaacagtcagccgcggactggaaagcgggcgagctcgcgcaccggggagaagttgctcgaccttcgttcacggagttgccactcgggcctgagtgcatctggcaatcgtggtcggtagcagcattttgcatctcgaaggtctgcaaccgggttgtgtctgtaaaaaaatgaccaggtccgaattctcccgctgcacctcgtctcctccagttgaatatatttctccgaaacgccttggacgagagcaagaacgtcccagaagagggaggtggaaggaataagagtcagaacgtctggctgagcgctgcccagtgaaatagactccggggagtcgatcgcgcggaggggatagaccttcgactttgagagctcgggtggagaaatcattcacggcggagcaatcaaatgaaattgacgatgaatcgcgagcgaacacgcaattctcagggacacacttcggaccaacgatgaattcgataaatgaaacgatggggtcgaattcccacatcgttgacagaaccaggagcagttttcttttggaggttcctgtcggcgctctctgaggctgttattcgaaggcggggaggctattgtcccaataattccgtcgtgtactgaccttgagttgaacaatgttcccacgtggtcttcatctgcagcacatgcactcctctaattcccttataagctctcgcacctcttccagtaagaatgatggaaagcttcatccgagagccggcttccattaccacgtgataattaaagcgcggaactggctcatgaacgtcgaggacttgcgttacaaccgatgatgaaaattatgactgatgaccatagtcttaacgacctagaatttaatttgagtattccactctccctcgacgcaggtggaattcgactcgaggacaacccatttcgttgcgactgcggtctcgtttggctttcgcagtggatgcgcaggtggttacgagaaaccgttaaagtccaacggtttgagcccgcgaccgccctgcaactccacaacattgcgagacagtccacctgtcgactcccaaatggaaggtgagcatgattatcccccgagcgtgcgcggtacctgccaggctacaaaaacggtgccgagttcccgggaaaacgttctctcagtgagtctgcgaacatcaagagtctgcagtgtactttcatgaattgggctgaaaacttagagaatgacgagggagtcaacggggcgagacgaaagttcaaactttgagggtttctctccgcgcgtttttgtatgaccgaaacattctcactgttatgacgaggatatgatattaatcgatccgacctggaagatgtcatggttgcatgggtaatgggtaacgaggcgcccgtttggggtcagcttcatacctcggagaattttcgcggctagatacaggaacgctcacgctattccgagcgctttccaacttatttaacctgatttcggtaactccaggtccatgcccatcatcgaattttcgtcagacaacttccactgttcaacgacgggtgcatcggttggatcttctggaagcatcgtcccgtattgggcgcttcaggtgggagcacctcttctgacatggctcatgctataattgtaaataaccgaacaatccaatcaaaataaggtgtgtatagaaaagcaataaatgtttctactgttcgtcgatccaacaataaaagagtaaaaacgaaagagtctctcctgcatcaaagaaccacgaaaaccacgttttataacttggaggtcgtataaaattggaggcacataccctcaatcccgagtccggatcctcgcgagatctgtcatgggatatatttatcgagctcgtttgagagtgacaggtagcggattcgatacgtagtgagtgcagaacgcgaacttccctcgtcctgtttttgctcgacatccctttggcgcagtatcctcggcgtgcaattgttgtcgaagacccctcctataatcacagtcgcccgttttctctctcccgctcgacgttctatcttctccgaaacacaaacgagattaacgcgaaaattgtcgacctacacatcaagcaacaaataggattgcaggagccgatggtgtgcgcgatgcgaattcgaggccacgggatgagattattgctaattagaacatattcgctcctcgagagcaaggttcaccaggacgtcaggagacccatagggacaaaacactctcgtgttctgattaaagtttacgagtcatcttccgttctgctgatcagagacaattcacgggggggggggggggggggnnnnnnnnnnnnnnnnnnnnnnnnnnnnnnnnnnnnnnnnnnnnnnnnnnnnnnnnnnnnnnnnnnnnnnnnnnnnnnnnnnnnnnnnnnnnnnnnnnnnnnnnnnnagtcagcggaggatgatattcctcgcaaagaatcgaacacggaaccatcccatcaggatacactgggagtcatccctttcaggatcaagccagcgaacattctccgattcccagttcctcatccttttcgactcttcgatggccgagatgaaaccgcgctttgaatagtaatgaaatcgaaagggcgtagtcgaggtcgtctaggaaggagctacgggaccgatcgacttctatctccggaaggaggctgcgagggactcagcccgactcatccatctgactgagtgactggcgagtgaggagatcgataagttagagggacccgctttgtcatggcacgttgacaaatttggacacttgtcgattgaactcctttttccgcggtgtgtcctcacttcggtgaagggtccagcccgcgtcggacctgctagcctgagggcatccaacgcattgacggacattgttctccgagggaatccctgcttcaagtgttgagccctcgagagcgggggcgcgcgaagaaacggaagaagcaatctgcgtaccgagcgtagggctttatcgctcgttgatccgattcggccgacatgtacagctactctatacccgattcgaacgatccgctggagccgactgcaatcaggagccgccgaaggtacaacttcaacggcgacctgactttcttccatcgcagcgacgagtattcacgaattctcgcccgtaatttggagcgggagctcgaattcactccccaccctcaaaccgggtaagcgtctttgagctccttgcaactccgtccgcgaacggtctctacttccgatatcgttcgtctgaaatttgccgcgagaacgatgcgggatattgatccatgaaattcgtgcacttccccacgcccacttttaatgaatctcactccgcagccccaacggaatgcgtgctttgctcttttttgaggcgtatgtttcgaggattttattcagcgacgagtccactttgatttaacgacttcagcacgatacgctccctgatcgaatcgcgtttccagtcgattctcgcgcatacgacatcgctcggaagccggaggattcgctcaacttcaaaagcagaaaccccacaggaatttgcggcgcttgatccaacctgtattcgtgctacgatcgctcataacgatctcatgcgtcgtgggattcgtgtaccagagcactgacttctttttgggcttcttccgtttcccaaccacgacgaacatacggttcgttcgccgagagatattttcgagagtctctatcatcacaatttccccggcctcctctgagggacttgggttgatcacgaagatcattcctggagcttcgatggcagaacagtggaattgatgctgacagctgtcgacccacctcagagccttccgtttcagtgtcgaatcgatgaaagacctggtcttcccttcactgaccgtttgcatggcgaactgggtgaaccgcaagaaggtacgcaatgccgacacgtcgcactgagttccatcgttcatctcgaatttacttatcgcttttcaaggattggaggctctgctgaaactttttccatcctgcgaatcgaaggtgtgcgacatcgcggcattcagtgaactatgcgaggctgagcccccgagtccggaacagctgatcaacgcgttgtggaaacacaaacacatagaaaccctggcgttctccaccaaggtgaacctctcgaaaagcaaaatcctggccaacgttcccaaacctcaaaatccttattcctgcaggaaataatcgggaactgtcacatgaaacccacgtcgggttgcaagcctttcgattgcgacgaaaattgggagttcgcgtactcgaggtatggattccgtacggcttcctgttatgcacttgcgaaggaacgttgccccaacattatcctgctcgactcggccgatgatctccttgtcctgcataaaaacccctcctgagccccggggaaactgccgcgcactgctctctgcaaaacacttacctgagtccgagatctctgatagagctttcctgtctttctgaacgcaggtttccagacgcgatgtgttactccctcgacctccacgcaatctcggacccagaacatcctctgaacaagtgcaaatatccatgggactacgaactgaacgtcactatgggatgggacgaacaggacacgctgcaaatctcggacatgtacaaggccgacgctgtcctgcaccaggcacttaatctcaatcttcgtggatgagacgatatcgagttccggcccacattattcctcttgttctgctgccgttgccaccggtgtcgttattcgttaccgttgcaggtggacactaactccgctggtcaatcccatccgttgttcttcgagcccggagcccggtacatcatcttggttgagcagtttacaaccctggcgttaccgccgccttatcagacccagtgcatcgagtacagcgaactgcccaaatcccgaatgttctacgggatcaccacccagaacctctgctacgagatgtgcaaagccgcttcgtggcacaccagttgcagctgtgtctctccgaggtcagcattcggtttcacgcgaaatcaccgaccgatcttaacgttgcttcccaggagacggcggatcgcacatttttcatcaccttccctctctcgacagatacccgtaccgggatcgctactcagaagtttgcaaccagaccgaaacggctcgatgcgctaagatagacgttgagcagctcttcaccgaacgctgcatcaggaagtgtcgccagccctgtaaagaggtaacctacgaggtccaagtcaccgctcagggtcagagagaggggagaaccggcggactggatgctggtgagttctcgagtgggctcaaatacgtaacctgaaacctcgcgtgagattcagttggttggacgctttcgtgaatcgtccgatgtgatgtcgctcgtttgtttccggaagccaagagcgaggacgactactacgatgaagaaggaatggcgaccgaaagctcgaacgacacagaagcatccgctgtctcgaggaagaaattcagtctcacagttatgttcgctagcgaaaagcacaccattcttcaacacatgaggaagttcacattcattgaggtgagattgatctcgagcgcgtgcctcgtacggagcaacgagtttcccccagcattgatatgacgaagcgtttcgtggttgcgctaatgtagtccactgaagcaacttcctccgaagtttggcgaggcgattttttcacgcagttgttgttggcctagtgaacgcggcgctttcacggattatgaaccagaaccattccacagcgtaggtaatgagaattgatttctgtgatcaggacacctttcgaagtttgagagacggatcatgactgactacgaacgaaatgaggaatggccgattcaggaaattacactgaaacgatcggagccgctccacaaatgttgggggggtccattataggtgatatacaatggatccaacccaacgaacttgctgagtgggcagcgctgtctagtactagcttgccttgctccactgacactgtttcggacgagatatcagcacgtaggcctcaggctcgatccggattcgaacgtcctcttaccgcgagaatggttttcatggataccattctcttcgggcgaacttcggccacaactcgactccgacctacactattcgaatgtgatcaagcaacttcattggctaattcctctcgcaggtattcgggtacttgggaggctacgtgggaatctggctcggaatgagcttcttctctgtcctcgacgccctcatcgtgcacgtgcgcctcaggtgggtagaagcttaggtgaccggaacgagggaatccagaaaccgaacgcatgtatccgagttcggagcagcggtgctgtgatggttgttggaggcatatcctagcatagtatcggggcgatgcgcctcatggttgagattcgtaacccggtcatacatgtgagcaagcacaatctggcaaggaagtacgtttgtacctcttgtggtgaagcactcgaaatttattagatttcatatgaggtagatagtggtgaacgagagaagtgtatcacatgaaagagctgttgagttttctcgccattctccatcggaaactatcaaaaatagcgttgttcttcgctcgtggaatgacatattgtataccaaaacgagtatttttgcactccgattcgaggaagttgggaaagtcggggttcttgacaaattgtcggaagagtcgaaggtcattcgagtgtcaaaagtatggtcagacctaccagggattcaccttcctagactccgaggagtgtggtgagatcgacccccgagccacctcctaaaagtcccgaaaatatgagcagatcgaccccggaatcactatcccagactccgagaagtgcgctgagatagattccggcgccacccgttcaggctcccatgagtatggtaggatcgacctcggaatctctccccccccnnnnnnnnnnnnnnnnnnnnnnnnnnnnnnnnnnnnnnnnnnnnnnnnnnnnnnnnnnnnnnnnnnnnnnnnnnnnnnnnnnnnnnnnnncatccttgtgaaccactccacaacatgccgccagctccatgtcgatccgatcagacgggtggaagtccatcgaggacattcggacaactggattttcatgatatgtgtatagaagagggtgtggggagggttggggtaagtagggggtaagaaggggtgggggaggcgatccgatgtcgatgagatgaaacttaggagtccggctggcgtcatggcccatgtccttccgggtgagccgccctacattacgcagtttgttccaagtcgatacgatcaataccggagtctatcgaggataaacaaaaaaaacagaccccggaatttaatatatatagatagatgagcgtagcagaacgacgaacctgcgtcttcgttccgcggtatcttctgaagcggatcggcgacaagctaacaacctcgaaattatgaccccggaaccaaagttttgaaagttcttggtctggtaccccatcataaaccacgactggggagttttataaagtttgttggtgtgctctttgagtgggtgatcagaatactacgatgcaagcccaatcgaatatcccaatcggtctcgagaaacggtcgaaatgatggccgttcatgtatccgagagctggtttatccgaggcagcattgtgctcgagtatcaagtatcatcacataaatcgagcgctctggtttcaggctccgcgcgagaaagcgagatgagaaggagacggacacgaactctacgaggtcctcccgacctacaaggaacaaagtttcgccgaaggataagtattagacttctaggggaatactctgatccgcagcgagcgcatcttctgtcagtagatagacggatgaatcgctgtgaccgcattggacggaaatcttccgtgatgctcagcggaaggtggcgaaccgattttcaaaacgaaacatcatctggaatgtttttcttctgagaaaatcgcaaagacctctggaaataaaaccggcaaaatgagctcgcttggaattctactcctggtccctgtctctcggatgacggcgtgaattttcgacgtggcgcgatcaagagagtcaagctgaatgattggagcctgagaagagacttttgagcccacatgtcgcaatgatggatcggcgatgttcctgaccagaacgaccacctgggtcgcgacggaggtcaaagaattcgcaaagggtgcaaagtgctgtgaaaatcccccgatccgccgaaaaaatcacacgcgagcccaatttccacgaaacagcgcagaagtgtgacggagatgggtcttttggacccgttcagaaccaagaatggaaattggaacgccggagaccggattcctgcatacttcatttgcttcatctataaaagatcaagtaccatcgctggtcggatctagagtcgtcctatgctgtgcaaatcaagagagggagaccgattgactgaatgacgcaatctgggtcatttttggaggacaggtgtccatcgaagggtttgaatgtcaccgaaacgagttcggttctgtctttttccctcgaagacgagaccgaatccacccgaggttcctcgtggcacatatgacggggtgatccgtggcacaagcgtggatgactcccaacaacgctcagggtctacctcgttcagattctggatttccgactcagatttccgagcagccatccatcagcagcatgagagatgagaaatcacccatccgtggcgagtccccggggacctcctccggaatgagcggccacggctgacttcggatggtttctcggagtgagcgaatcctccgatgcgctgatttgaatctcgatttcggcgccgagttatatcataccgacaaaatcattggatgaagcgggtaaccgactcgagctcagcagtgctgagaacacattagctcgccccagtggtaactgccggaacaaacgttgctcgacacaacaagatacggagcggctattcagccccgcagccaaccggcaagaaagcagcaaagcgaccggcctacggtggccaacccgcagcagttggggaacggtcagtaagtcagtgaagcgacgaagccgaggaggtttaggggtgcctcagcatagcctcaaaggtcttaccaacgaacgtgggatgaagagaaacgcgcgggccagcaggggctgagatggcagcgcccgcacgcttcggggtacagggaaggtggcaaaaacggagagagtcagatgagcctcgtcgggggttaaagttatcctttggggctttgcggaacccgctcgtcctcctccgcctcgtcgcttgtaggtttgatcgaacgagtgcagagaagatggataatctgtctgaggagcggggttgagcaggaatcgcgcgagtattcagagcacgtgtctccatattcaaactcccgattccagtatcgggagcggagagacggctgggatcaagtgaccttggtcccatcgcactttgttctcgaccttagtttgatccgtgtctgtccacgctctcagatgtgttgtggtggttctgctcggttcattcgctgggactgtcttctgggattcgaggcccattcgaattaacggaggtggattgtaaacgactgttgtatctcttctttccccaggggtcgtcttgttcacttgtcgaccgtcgtgactcagaaagcaaccaggcgagcacctcaatttcaacaaccttctcgtcggtcagaggtcaattgtcccggcagattggacggggtttcctggctctacaatctttcccctcatctctcgttcggtttctcttcagaaactcgattacaagggagtcgattgagactgttcggcaaaccgtccgaatggcacatgcggttgcttgaactctgcgactgtgagggaatgagagtaacaaaacaaactctgcgttcttcagcctgtgcagtgtagaagttgagaatttc

SEQ ID NO: 86 - DNA, 177018 bp, Phytoseiulus persimilis
  source 1..177018: mol_type = genomic DNA
  variation 99333: allele = a; note = SNP_9
  variation 99595: allele = g; note = SNP_10
  variation 99605: allele = t; note = SNP_11
  variation 115325: allele = a; note = SNP_12
  variation 115354: allele = c; note = SNP_13
cgacctgttcctttgaacgcacccgcattgttctcgggagtttcaaacttctttcttgttcggaaaaaaagcgatttggggtgagttttcacgtctgagtttgggcgttccgggcaagtttgtcgatttatccacaggtgtagtgctcgaaccatgattgccagataaaaagtcccatcgaccgaaataagctggtcaggtaatttgtgacaccccgaacgccatggagggaccctccacggtcaacatccgccaaaaatatgattccgtcttcttccgcgggagcgaatccatcctgggagatggtcggttttttcggcttgaccgcttgaatattgcaagtggagacgattaaaaatttcggccggtcgtgacgatccgaaaggcattcgcttccagccgggcagccgatgttcctcaaacacggtgagatgtcacctcctgtggccaccgtccagcttgacgcggtcgagcggcagtcgctgcaaatcgacgaaaacacagataataatttcaattgaggttacccgtttcgcggttgcatgagaacttctgattacaccggggatgggatggatatgatacagcagagagatgtgccagcttcattgtagaggctgtcgacgctgtggtcgacgaccgcgccaggcacacagcacatggtatcggtcaggccacggctcgctgctccggcgagagtcactaaaacgcggcaggacgagctcttgagagaattcgggagttttcttcgggaacgatcctcagaacaggagaacgagactcctgctgctatgcgatgctttctggaatggggcagaacaagtcttaatggccaccagttaaattgtgtggaaattcgaagcggtcgttccttccggtggacgacgcgccgtcgaaatttgtgcgttgagagaacctcgtttggagttcatgtgcgcggaaaagttttgcacgcagtgaaccagtcgataactcccctgcggtaacgatctcccccgaccgagtcagtgaatcattgaccccgaactatcgaatgcacattttcctcagcgatagacgtcaactcgtgtaccaagggtcgaacgtcgtttccctccgtgcggtttctgcgattttctctccactaacgagagagaagagtttcttccgaacgttattcgatccggagcaaaagggaatttcgggaaatcctgagtcccgacgactggaatcgggagaaagtatggctttcccgctctttctctgtcacgtgaccatcacgttcccccgttcctatgacggctttcccgagcggtggtccagtcaacgttactgagaaccactcgtagttgagtccatgtccgactgctctgtggcggatgacggtcttcagattcgaccgacgaatcgaccaatgatccaccaggattctctttgcgtgattttcgcgtaggtgccccgcagaaactcggtgtgattagcaggaggagaatactcctgaagcttttttttcccgccatcgctcgcgtttgacggacgaccttgcggcgcggctcgctcaacgcggcagcgtcgggtaatcagagccaccagaaaacgcctatcgttgtagtgcgcgtgttcaaacacccgctttcgagccattgtgtattattatcatcatcgatgtacgttcgacgggaacggcaacagaccgaggaacgaacgaaaggaggaggagctaaaggacagtatcacccgagctcggtaacaaaaggaacgcgaggcgaagcccggctctctatgtacagttttatgaatggacagacgcttcttttgcgccgacgtgccacgtgctcgagtggccggtgcgcggcctcgcttcgcagtaattgcctcggttacagacgacctcaattcttcctagtaatggaaaatgatcagctgacgcagggttccattagggctgcgagtccaactttcccatgtctctcggcgatggaaagatgcgagctccaagtctctcttttttctgctccgatttccctcgttcgcccggtcgactgactgacgagtgcactcaccaggaaactccacttcggaaatctgagaagtcctccgaaatctccagatccgactttggattccacttcggagacttgaagcgtcctcggaaagattctgagcaactgaccgaacggaagtttggagtagttggagtttttttgcgctgggttgagaaaatgcttgtgagctccaattcacccagttcgtctgacctcactgataaattccttcactttttgggttcgtgacggaaataagaacgggcgacttggatcccatcgcgctttcaatgccgatcttctgtgttcggaatagcttcgcgcttctttccccaaggttgaagggcttcgagcggacgccgtttgtccacgatcagcgatacgcttgaactgctatgtggtgtcgatacgcaaggtgacgagctcgaacggagaggggctgactgccgagttgaaactttcacatttggagggaagtgtgatcgtggccgcattccattcgggatcgggcggctgcaccaggaatgagacgggtttcgatcactcggtgctcgatgattttgagggaaatcgggaaatcaatgcgaaaatcgagaatccgcaaggatctttcgtcgagcgattctgcaaacgaagcgctgatgaccttcagtggaaatttctgatggtttcagtgaattattttctcgtcacctgctgtaaaaccgttctaattaattttgcgtcgtgacgtcgggctcatgttcaatgacaatgctcgaagagaacgctcgacgccatcgacgggaaagtctctaaaacctgcatcgacgacaagaacgcatctcgcgtgagtccagtgtttgaactactcaaggaccttgctgcatcgatcgcgggctggcttccaatccagctgtagagtgtccgagcagtcatgaaagcgatgctcaatcagagcgatcaaaccgcggatgcgatcgctctcatttcttaatcattgtccgaccaggccctgacgaggcgggcgcgtcctattccgggctgcggttctgacggagcactcccattaatcccactcccggctcccttttcccgaagcgggctggaactgcgaacgacgcggcccggggttcgcacagctcagaaattctcctgtcggtcctactgttcctgagccgggcagtgtccccgatgtgagggaaccgcggtattctaccgcgagaggattcaacctggaagtcttctcgcaggctgctccgactacagtcctctgatccataagtccatgaggaaaaacgaccggaaacgagaccgtctcttctgatactttgaatttccgccgtggtcgaaaacgggcgagagttcaggactttatctcgattcttagggcgagaattcccggaatccgaaattcaagtacagatgattcgacgtttcatgcagcctggaaatgagaatcgcatcgacggcttcgctttttctggtttatttatattttgaggcttcacgcgaagtcgagagtttccaacacatcatccggcggaattctgggttcgcagcgagcgaggggagaactatgaaatatttccgaaaggttccaacatccttcaaggctgcggccgatgcagcgacgacggcgacaactgaccagctggctcgcctctttctatttcggtcgcggcggatgatcatggctgcattcacctgacgtcatatgtttttcgccgggctttcctcctctcagttttctagtgcagaacattccgactgcctgaacttatcggatgacttaattagacgacgcgaaacttcatcccaaggtttcttcatctagctgcggaaatcgtttccgcgccaagactgctgcagtgacctcacagctggtttgagctaggtgcaagagagcggcacccgaatcatctgtttccgtattcttctgagaacgaatcctcggtcgtctgattgctcacgttcctcttctgtccgcttcgcgactcgcgaacgtggccatgctcgaatgtacttccaagcgtgtgcgatgaggatcactgaagatctcccggacgggggaaacgttcattgcagttggtgacgcgtggtgttctacgcgtcgagggttcgggagtggaacttgttgacttaacaccgcggttggagcagccagctcgcgctattccctcggcgcgaacagccgagcggatctctcgctgcggacgccgcgggccatgattcggtttgctttcccgttccgagaggaactctgacgaagatattcgcttgaatacgatctaaacttgtcagacgttttcggtctgaggtacgttgtgagaggccgctgcgaatttcttctcgcgacggtttcgcactccaggcaagccagcgatgccgaagagaagaggaaagctgttcaaaagatagagaattccttcgaggacgcctttaaatgaaacgatttcattcagtcgacggccgcgtggaaccgacttaaactgcctcctcagtttgaggcgcaagggcgcgattcggtagaacggttggaattccgggagcaggcgaatgaagcggaatgaagctctgattcatcgctctgccccgggagagagaaacggcacggacgggttttcgtcgagagccgagttgcggtggggagaggagttcgaagcccaacattcaggagagcacatccatcaaaaccgcgtccattataatttccccgtcgcgtttccactcgaggattttgaatccgtcctctggggctcgagcctaatatttgggaatgaaaaaaacccaaggtgactccgggaatcgagaggagctctaggggattcgaaaacgcgagcggaccccgttcaaaaactcgccaggaatctgaggatggatctgagcagtcgccgcgaccagctccccatactccccttcccgcgttcgaatgacctaacgcgagtccaccccgttcgtttatctccgtgagtagttcgacaaggagggaggttgctcgtagaggaagccgcgatgtcagcgtcgggcctccgctcggctgggacactcgcgaacccgacctcggaaatcttcgtcctcaaggacattctcacagccgtggttaacggttcgctctgctctagattccattgtatctcctacctctcagagcgagaagaggaaggagataagcatgaagagcattggtgatttattcggcccatctgaggctttcgggtgaggctcataaccggccgtttggtgtccgagttcgagcgatgcttccggaggggagagggaactctacggcgttggaagagtttatcctttcatttcgttggaaacttttcatttttcatccaacgttcagaattcctgagccgcgtgaacagcgccaaatgggctcggcagagcgttccgatgcaaaggagatcgccccgtgcttatcgggcgcaggacgggcttccaaagctttaccaagagatgttccccgtacaggcttccattcgcaatatttcgcgactctcgtatcctttggcaggctacgatcgggatgagatttcaacgcaatcggtcgaatcaatttcgtccacgcttcgagttcttctccgtgtccgacagcgcggagcaggccatctggacatgactgtttttctatcggaacattgatggaacaaaattaatcagaggtccccttggtccggacctggtccactggtcgaagaatcgaatcagatggctggacgagatcatggccatccagagcactgccaaaccacgaagttggtgggtcgacgggtatttcacatcgcgaattcgaaaccgtgtgggtgtggttcgtcctcgagttcggtatcggactcggtctggttatgaccctcgaccaaccacctagacgccctgtgagctcgagcagtcccctgttgcccggctattgagagcagctttccccaagtctgtccatcttgtaggctcctgtctctgagaaatatgctgcggacgccaaagtaccgggttgaacgtggagagaataacttgaggaccctgtcggcgcccagtccgcctctataacgcggacagtgacgcatgggagaggtcgtaaaattcgctacatagttgttgaatgcctgcctgcattgtgggtcggaagaaccgatgtcgaacttcttacggctgcattaaggcactagacgtctgagtcgcgagcggtttatacacgcagctttccgaaggtaatgaccgttggacatgaggtccttcttggtcacgtcaaactcctcacgccttgcgtcgaggacttacccgattgaagagtgttggcagactacaggaagcaaaagggagtccgggaaacaaattcacccggaataacgctggcggccggacgaaaactcacagtatcgcgtgattacagccgtggcgtccgcaactggttggcgagaccggttgcaagcttcgatattggctcgcaccacgagatcgatgcacacgctgagacaacacggatgtttccgaaacaccgtgagccgatcggttgcagcatcggaacggtggcgcatgcgtttcggaaaaatctctgccattctattgctgtctccttggtctctgtgtcgtatgcttcatcgttggctcttgcccatggttatggaagcccccgaatggtttctctgagcttttgactgtgatccgacacgggaatccgcgcacgtaatgcggactgcgccatccgttcggccaccccgaccgcgacacaccttttcatcatgactcgactgcgcgcgaagggatgtgttccccttctttggtctgctggctagtctgttggttctccgaacgcttggctcaccggcttctcaccggctcctcagcgactgttggccattctgccggcccgaacacacctcgtattcacttctgtagatccgaatcagcgaaacgtgtgcactcatccaagttttgggatctcatcgtacccgatagctgcattccgaactgctcgaggattcgaatcttttcccggagcgggagacttgatggactcgatggtgcttcgtcggctggtattgctgtccgctggttcgatcaccctgggaccttctggagaaccctctggggattccttgtttgctctcataaaactacggggaacgggaatcgattcaatccttgtgcagtgatgttcttccgagtgcacaggaaaccgcttcttatgtcgatacctcgaggggttgattcgccttcgaagtacttttccgatattttcaccagcttatctaacccgaggcccctttggccaacttcggctcagcctatctgttcctatcttatcctgaaaccgctcgttggatttcaactgagcgcgctatgcaatgtgattctgtacaagtgcatatgagatgaggtgggcaaacaaaagttccttatcttatcttgctcgagctcattccacgttatctctccttgcgtgactttacgatctgccttgggagttcccagaataagtaacgcggggccaaatatgatttttcaagcggaaggtctccgtaggagacgtttttcgctactctacctccattctccgtttttctgaaaggcttgtcgctatcggagtctctcggaggaatccgagaaataccagagccactcaactgatcgaaagggaacgaggaggttccgagtgggctttcttccgacgagcgcaggaagagctcgttccgttctgagacgtcgcatataggacgggtgcgcgcggtctctggagatccgttagagaacttgtctgtaacgtgttcgttgcattgatgagaaagagctcgttcgctcactgcctccaccgctttcttgtacttcttcgctttcttcttcgctgtcagcaggctcgtggactccccctctcacgagccgggctccgtggcctggtggtttcactgttccgagccgcgccccttccccgagttgagcccagtacgagacatgcccgagaccgaggacacttgcttctgacagcggagtcgtttgtttacttcctatgtgtttgcgtcgaattcccagccaacagcccgggcttctcgatcagtaacagacactggctgcaaaggatatcgagtgtctatcggcgatcgctcatgccatggtccactgttaccctggagctttttcgctacttcccgcggactccctgcaacagttacttgcagtggtgctacaattcccggggatcctattgtgttcctcagcctctcacagtagtagcctcttgcagccagtggtatacttcggcaacataccacaattgcctcttagtactttgacagatgctagcctcaggccgagcttatttgatgattcgtaattgggtctaagctagcaggagtaggcatcgtctcgagctctactcaggctaaggagagggatcaggagaacgagtttcatgagattagaagcacgggatctggcaggaaataagattagactcagtcgctctgcgaccgggaggtctttagaccttgaatcagtcggaaggacgttggttcgtggaatgagtttcctctccacgccgcgagaaatgattccgattttttttttctgattcccatcccgctgcttcgctcgatttggaatctttgaaatcgccctcatccgagccgaggccatcctccccgagctgatccgcgaacaccatcgtccttcgattcgttcgatccgtatacccatctatcccgttttatagatcactctcgctcctctactccaggagaagtgacgttctcggtacggataggaaggacgggcacgttgttgacgacgacaacaaccattttcatgatggtgcgatcatggacgatcatcgccgagcgttcatagataaatggttcgagatgaacgaattttcaaagggtgtatcgatttgcatgcggtgggcgaccatttatctcgatcggggccatccgaacgttgctgacagggtcgagggcttcgcgtgcacctcgagcattcctgtacgaaattccaccgtctaacgaggccgggtcgttaatgtgccgggccagagcctttctctgagcgctccactcagttccatggcagctctgagaaaaacgagaacggaggacgttgcagcttctcgaaacgacaatgcacggactgtagatgaacctgaacccacccccgagcggcacggaggcgagagggcgcaccgtccgccttatcattcggttacgtgatcgatgaggcggcggttttcaccgacggaagatcgtgatctttcatgttattgcattcttcgccccttggatctcgcccttccgttggaggcttggatcatagcaaacagcttctccgaatgctgtcgaccgaaccttattgcatttcaacgatcgaatccgatgacgtcgatgtgagaacatggaacgctccccggtacgtctggcggtgccctcagtcagccgtatgaagccctgcagcacggctcgatactttttgtgggacgacagtcggcagacggatcatttctatgtaaatcattccgttatctccgtccacgtctgtactcggaggagattccatgtcaactcgggaatggtgaaaatattcacaaattcacatgattgatgacgatgacaatgctaatgagctccgtccatcagctcgcccgcagtccaccggcagagcgagaggaatggagtgctccagcgtgcccatctcttttcctgctcccaaacgaacggagagaccttcacaggaaccggagctgaaagggactattcaggcatggatttcttgaaaacactggaattagcgcgaaaaagtttcaatggggttccttgattgagcccgcggcgaggattgagcggcggcggtccctccacggctattcctcccttcccgtttcctcgaatcgttaaggaaggagtgtattgattgtgcgcgttttgattgcggcttgctctgctctgaattcgaaacgtttggacggagcttggacgggaaaccgaaagacgtttgtttctgctcgagtaggccggctgacgttgatgccttccagtcgggggacttccaagcgaataagaagtctgttctgaagtttcaagtcgccgtctcgggcttcccttcacgtcggactctcgaattttccggggcttccgttgaatcacccgagtagaccgctgcgacagacgtcagagctcaacgtcagaagacgttcagttttgaggacgtaaggtgaactccaccactgattcgtgcctcacgagcacaatgtaccgcgacgtataataaatagttcgagggactttctcggcgaagccattcaacggagaacagagtttcgactccatccgaccacgtctcgagtactccgagtcgtaatgattgctaatgattgcttattcctctttccaggaccgatcgtgtacgcttttatccgaggaaccctgagaaaatacttcggcatcgacgcagcgaacaaggaaatcttgtgagaagatcgctcagaagcgaagcaaagccttctgaggagttcttccagtgaatggcgaacggggcaacggccgcatcttccgtagagctcggctcggcggtgatggcgtctcaggtgcccgtgtttcctcaggtcggcgcagtaggcgtgggcggcagagctgtcgcaggatttacctcaccagatcccagaacattagctatgtacacagcaatgcagaattcagctgccgtccaggcgcttcaaggaggcatgtttcccggcgttccaggaccagcaggagtcgtaagttgctttctcgtttattcgtctacttttgcgttcaatagaaatcctgttgcgcgaaccgatacacacggaactaggaatgataacgaaacacagcgcagggagcggcgagagttcgcttgttctcggccttgtttgcctcgatgtcggaaagaggcaaccgctcccccgctgctcgttctctttgaacttccattcgcttcgatgttcgccgagctctgtttccctccgcttccggttgcaccttgcgccgccttctggggcttaggatcatcctcgtcttccgcggcacggttcccatcctctacgttactctgagccccgaaagccgctggattttctcttccgctccgctaacgttgagcagggaaagttttccacgcaggagggagaggatcctggagtgctgtcctcccatatcgccgctttcacggtctataaatcgtcatctgacgactgcactgagaccttgattgcaacattgtaggacgcttccggccgctcagctgttgtcgtcgtgtttgaaatcttatgattttcaatatgagagggcgaagacggcccgtcggcgccagtgagaacgtcttcattaattccctgggcgacatgaacaaagttcgcggaaaggtccttagggagcgggctctgcacaaggagccttttccagacccacttgagaaggagcttcaagatgaatagaacgaaagattgaaggaaactccagcggagagtttgaagaaaaatttacaagcgagctcgagggggaattcgaagaaggtttgaaggagaagcgagtggatgaagccgttagagggaggagcctctcgagcggaaatcggggagccaagtggagacaacacggtggaagtctgagagacgaacacgacgaaaggacaaggtcgcttcgaaccgacgatgatgtggatagtcgccgtttccaaggtggcagtcgcttgcgggtgtggtctcgtgctttttcttcctgccgcttttggaggtaagccttcttgccctccctggggaactaagagctgagaaagatacgcgggaggcaggcaggctcaaaatgaatttgtgctggccagcggactcctttgtttctcctcgaacacagatcacctttgtaccagggaggagctcgagtcgcacagaagcccggatcctcgctccattcttctcgaacttgctttcctctctgaggacaatcgacgataaataatacattggcaatcaatcaaatcgggttggcgttgtctcccacgcggtatcatctggaggcgacggctctctgctgctctagagcgattcgaaatatcgataaagctcgacttccaaagggaccgctgctggagtcggagctggcaaacacaaggagttgtgaattgcatcgagttaaggttttcgatgagcaggatcgagacgtccgggctaggactcgaccccggaagccgatgcagacgaaaatcagatagtctgcaccgacccttcacgtgaaacctctgacgtgaggtcgttgcgtggctcattgatagctctcttggaattggccgttggaagtgttcgatagaatcggctattcagcgcgttgtgtgcggagtctacgctggttttcgttgcatagagaagaggatcccaaatcatgctgcacgtgcagtagacgtcgttgaaccgcctcaaggcaacgtcgtttcctccgagccgatcttgcatgcctcttacctcttcaagttttcgctcgctcgcgaagatcccacgacgtctatgggatcttcgagttcttcctctgtcgatttggagacttctgaatttccatggactcagcgatcctaaattccgtttgccatcgttcatgcctactttaacgattcgagcagttttcgagattttcggtcacgcacgcctcattcatgattgcggcatctcagctcctctcggaacgagagtatgattcgcagtctcctgtgtcgaagtctgtgaatgagtttgttgagtagagtacagagggggatggaatggaacattgaaatcctgtggcctctgggcgtttgacaacaaaagatcttgcgatccgaggaagtcacaacatcgggtcgtcactcccgcattgtgagcgtgagagtgccctgggcctcggcgcctctctacccacacgtttttggttcgctccgcgttgtctaatgcacgaatgtggttctcagagcacatacgggggagcaaggaggttgcctgaatgtataaaaaactccaagctgtaatcatcattcgaacaatggcgtgatacgatgtgttgccgtcggaaactgagtgcgaactgcacgctagcacgtcgcgccgtgtggattcgtcaatagaaaccaacgcatagaccgagccagcggtcctgccagccctccgaacagggcgctccacctgcgctcggagatgcagttgcagatggtgaatgaacgaaagccgttccgtccgcgaacttcttattcatctagagcgggtcgtctgaccacgcggtgcaactccgtggcccggctccttgttcctgttcgcactgtctccgactcctcagcgttggtcacccggaacccctcgattatgtgagcgtttctatcgcaccctcagcgcccactcccctttctcaacctctgtatctctgttgggactcctgtttccggcagggagcccgactcctctgcacccacccgcacgcaaacggaccgaccgacaactggatagataaacgacgagagaacgggccaacgaacgaacgagccgagaaacagaaataccgtctctcgcaaaagtacacagcggctacctctgaacaaaggttcaagcccctctgagagagtcgatgtggagagggcccggccgtcgggcccaggcccgcgtggctcaattgcatagagttgtagaggccgctggcgacggacgaacggttcgttacctcaatcaagcgatgtcttggacctgtttggtttttgtttgtgctttttgattgttatctgtgtacatagtaacttcttgtgaaaaccgaactcgtgattaccgctgtgttgaagatacactgcccaggcttgactgaaaggtgcagatctggggaatacgaggaatagtgtttgacgttggttcgacggggtagaaagccatgaacatcttcagtgagagtgttatgcgagtgttcgatgagaatttcaacatggtgagtttctatggccgttgtgacggggccggaggaaagtcgttgtcgcgtctaggctcggtgtgtctgatcccgcgacgatccgagaaacctttccacgaattcgcagggttcggctttcccgttcacagcgttgattgggccccgtggcgcagggatcccgtatgagctgctcctgtatcgtcattgctgagtaaacgtttcctctgttgcctgagttccatctggttcgtttggcgatcaacaagcgagacgcataccgccggaacaaaacgtctctctgcttctgactgacgagaatatcatctctgattgggtttgcgattccgcgagaattttcgatccgagccacgcggtcgcatcgtgccctccgttgccgctccgtgaagttcggggcatcggattgatgagaatacgcaaaaccaggtcaatcttcatccagtataacgatgctccaacgggagactcccgccgcattcaaatcttcatctcctggacagtaccgaccttttccaccgcacgcggtcgcttgagataggttatcgtcgctaagcgagccggaagcagccagccgatcgtgttctgagttcgaacgcgacgtctcctttgttgacacattagaccaagtcgtatgatggacccttgacgtgtctctcagggagcaggttttatattctgcgtcggctccgttgacagcgatctggcagctgtatttgtcctcggatgtcacgccgcactctacgaggcaacgtatcctatcagcgagggcttattactttccgctggttttaatgcgtccgcctgatcattttgtttcgtgtcgagtgctaagtactgatcatcgggatcgttgaacgattcgccgcattgccggtcggagaacggccataggggacgtcttccgcggaaagcagtctcgtccggccagcgctcgctttgttcgtggctcgatgcccgggttcgcaaagcagcgatcgaggcaaagacgtttcgtctgtgcgatacgctcatccatccgctggccttatatgttgcgatgaccaatgctgcagcccagcgtgacccggctgcgtctgggaggggcctacggaaaaccgatgcggttctcaccttcctcgattccaaaagttgtggctccgtggcagtagagtgcaagatgggcaacggtagtaaaacgtcgttgccgttgctgttccgctcgatgcatcagtgccaggcacgaactcgctgtggttcaaatcgagcttctgattgggaagggaacttttgattatcggagtttctccgggaaggcactcgggtggcgaccgaaaatttccctcgcctgtttttcgagggaagcaaccgttacttccagcgttgccgtgacttgcatctcgatgcagctgctacgacgcgcggagcagcgctctgttggagctgtccaactggaggggggagtttgcgttcgttgccgattcgatttacgtcgccgcggattgatggctcagagaggaccatcatggtgaatcagttttgagcgaagtctgccatgcgttcagcagccgtagctccgtagctatttcggcatgggaatcagcaaggtacggcaagagtgtattcggaaaaggaggtcgagttccgagtaaatgctgttgatctttcccgttactttcgctaccaagaagttcggagtgcggcaatgtcaggagtaatcgtaggttacgaattccgaagccctgagtgcacggggaagaactttgaagaaaagccgggttcaaatgttggctcgagggaacgagtctctcgaggagggggaacaatctcccgcgactagttcgggaaagagatctggatcccgggtcagatgcataaagccaaaaatatgtcgaagcagcaagctggacaaaaacgaagattgtacatttataacaatcaaagcggtcagaaagagacaagttccgccattaaaactaatggtcggctgaccattgtgcgcttgcacttatgacaatgctcactcacctcatgcattcagtcagctctgtttgctttctttccgccgctgcttctctttcttcttatctgcgacaggccggctttgcttggcctttatgagctgagttcgcacttaaagcgacgatcagcggaaaagaatgagccgcgatgagaatccgaaggaaaaacgcggaaatacctgtccttccactctgagacggcactcgacacccgccgaacattcttcgacattactcggcgtccgtcagctagcagccgcggtcctcgatcagtttcgtagaggcattgcgtcggctcagccggcaaacatgttgtcgtttgctccgaggatattctccaaacaaggggtggcaccgcatttttctcatctgatgggttgcagccatccggttcagttcgcgaagtcgtcggcagatgcttcgcatcctgatgctcaagtgggagcatccaagggaataagcggagtaatcgatttattggaatgcgacagtcgagagaagtcgcatgattcggaaatcagaacaaagccgggtttctagcattctatttagggtcagcaagggagctggaatctgcactcgggaagcgctcctccctgaggatagttcgaattgttccagcgccttcggctcggatttccaattcttcattttgtcctgttgtcgtcgtcgaagaggcgcccgatgtcacagcggacggaagctctcagcatcactcgctcgaatgctaacttcagaagcgctcgaggagcacttgagccgcagaaacgttcgggcgacgattagatttcaagaggccatctatatgctcaggagtttttttccgtcgagagctcgctggaggaaagggagatttgcgggtgagcgtttgagccctggccagccgagtgtccgccgagccggcaggcaggcacaacgagcgttgggttctcctcgttgaacgaatctctccggacacgccgctgaagcagccgctgctgccccgaccagagctccgacttgtggcgacaagaactctcctcgatcatttgattgttttcaccactcagtttttccgttccgattttttcctcgaaaacgaacaaacccaacgattgtcacatcctgatgttgaccagttgttgctgagtatcagctgtcggtggaaagtgcttgctccagacgcggtggcgaggcgacgactcgaaataaatgaagtttctaactgtccccgcatccacaatcgtcgacggcctggaggatgtgagtttttcgcgcgaccatcgctgcnnnnnnnnnnnnnnnnnnnnnnnnnnnnnnntttcatctttccgagattttgaaatcatcctgtgctttcctcccgtgagttcgtcggccataactattccatgggtctcggatgtcttctcatcaggttccttctgaaactctccccgtcctctccttccccgggcctcagtttcgattccccgagttatcctcttgccggtctgctactttctgtcatccagtgctccgttcctcgctgccatatcttccgactcggctcgggttgtccttcttgccgttcagacgcgagggagtttcctgctttgggctgtctgtgacggaggaagcaagagaaactgccccataataaatgcttattctcgagccgacaaaaagtgtcatctgcctcgttggtcgccctcggagaccggtgaatgcacgaacgcaatctcgcgctttgccagcagttttcattttgggctcttttcctttcactgattgacattttttcactgtcagcttttgtcgtcctgagagaagccgagccgaacagagtcgccgctcgagatcctttccgaaacaaagcagggcgcggagcccgcaacgcaaagagtatcgggaaaactcgcgacattatgtgggttgcactgctgcaggattcacagaaaggaggggcaattatctcactgctcatgggtcggaagaaaatgtcgcaaccagtcactgagagcaactggaacatatgacgaattctctaatggattcgaagctacgccctgcgccggctaccacgacctgtggtgcacgttgcgcggctgcgagcacgtacatacaggcgaacttctcccgtgcaggcaccgctgtcgcgttgtctgtgattgtgcccggctgtcgtcgcggcctgctgtaggtgttcagacacatctttcaaacaaccgaacctgtggatggccggccggcctgtggaacggaccgctttgctcgcagagctgaacttcatttcgggccggttttcaggccacggattgctcaaaatcaggatcgtacggctcgacatgagaggatccgattcggacgttgccgcgtgagatcgtcggaaccagcacatttgggaccgaaaaacggttggggatcggtcgagtgggcaagcttgcataacaagtggaatctgtccgctggcaacgtcagttccgactgccaatatgcgcctgtccggccgtgagagctttgtttacgctgcgacacgcgtgggcagaagctcgagatgattcgggtttagctctggcagccgacggcgcctgtctcctggacagcaccggcatcaacaagttgcttcttgacgtccgcctgctctctcagtcctgcctttcccagggtatatttttgaaaaatggctcgaaggtgcgctgttgatttatggccgagggatattgctgataattccaatttaggattcagtggccgagggttgccagcgtcctcgattcgttccgctctggcatgccgagagtttcacggcgtcggcgttcgacagcaaaacagaattgattgcccgctctggagtaaaactttgtatccaacgggcggattacagtggcttctgcaacagtgagcccgacttggagagttccctggaaagccggtcggtgagtcgtgcatatgactgcctacgtgctatccacgagatccgccattccatcatatctccgacgaggtgagggtcggattcggcgcactctccgagattacgctgctcttcgggcggcacagaatgagccgcgaccggggcaacgtcttcaaaaaagacttatcgttggaagatcatcggaatgaactagaagcgcgaagaagcgacgagagagagagacgaggaattgtcgcgccggggtaaacgcaataaccttgtagaatgtaatcaggtgatgagtagatttatgattgcgtcatcgttatgagtcgagcaatgtcgacatgagaagagttgaggaggcgcagaggcggctcctgactcaggagaacatagggctcggcgggtgactccgcgaaacccgcgaaataaaacgatgttcctgcggggaataaaataaagaactgctgttccgggatgcggtgtctcgttcgagtcgagtcttatctggggaactgtcctcaattgttctgaacggttctcaccccgagatatgtgagcgcggcgagagagcgctttgtttcacgtcattcctgcgtatttggttccatcgaagcggtcaaggcaaagcgcgaatgggtattggtcgcggctccatcgcgaaagtttcctgagaggcgccaggagttggaacccctctctctgctcgacagtctctaatcctggccagttccccactttcgagtagaagccgaccgagaccttcaacgtagaggagtccggcgccagacttcggttctcggctacaggacaacaaccgtgacttaggtcactcgggaagcgtctggtaagcctgattcgcaagaggagaggatttgagttggaggaaaaactcactctggaacctttcatgacgaagagctcgagaccttcccaagttgcgacacatcgcggctcaagtccactgccgtcgctcgttattaacgcgtctgaggtgaagctaaaggccaggttcgcttcggggcaggaactctgcgagctcgttgcgaatccaaaaatggacttccagctcctgctcggagctggctgcggttgtctcttgacaggtgtttgagactgcatagccaattcggacgagccatgcgatacgtatcggtgcagccgtttgaacgcaaacattccttccccgcgaatactttcggttgggtgattccggtcttttgttcgtgccctgctcggctccgctctcgtcgagcaggaaggagtcggcgctggcaatacaagcaaggcccggctcactcgctagctctgcatcgtttgctcagaattcgaaacaagtgttctccacgtagctcccagtcgtcgggactccaggagtagtccgctggaaactttaattccgggagttcttcttcgatgattccctctcctcgacaacgtcgtcgtggagtttggggcgaccggcgaacgggcgactggtttctacgagagtcgctcacccagatcgccggtcgctaatttccgagaggcgatgtgtggctcgcgtcttgatcctactgagtccttctagccagggaagttctacccgtgcgttatcctgagcctgcagctacgaggcgagtccgagaattgagacataaaacagcgccgtcttacttggacgcaggagtacggggaagcgcacgcgagggactggatgggggagatggttggaactcatttcgcggagcaactgtcccgttcgccaggggagaggggtagtggcggcgtcaaacttgactctccgaggagcagagtgagccgcggggagacgagtctcccgggtactcctgagccgccgagcaaccgttccccagaacccggagggcggaacattcttcattctcgacgaaatctgtcactcgatccgttgccgaacttcgaaatgcttgaagcctaattcggagccataatttcaggttggcgacctcggaggcatgcagcagttgcagttggccgccggcgggaactttttcgcaggccaaggcactcctggaccaagtgcaggggtccccggaccgatcgctcaggtccaacagcctgtgaagaaggaggacccatccaggcaacttcaacagtctccccaacagccaccgaacgcccagttggtcaacagtaattctcagaactcgcaacaacagcaggcacaggctcaacagcagcaacaggtaaggtcctctcgtttgccggttgtcagggcaaattgaagaatttcggtaacggaacctcggtttgttggtttagtagctcgtcagttcgttcgtttgtttgtttgtttttgagcgagatgcagactctgtacgctccgacggaatctgcatcagagagtatcgagaacggatattgggttcgagattcgagcggaagttgcctcagaaacccggtttcggagtagacaccagacaacacggccgttcgagtttctcgagccctcgggtcgtatgtcccacctgcgtcgggcctcctccgtgactgaacgtctgacgtgggagtcggcgctcgagcctggacctcgatttcaattagcatagttgatttctgagagcctgcgcgaagctgcagcgcgtaatctagctcatgaatcatcgcgctgccccgagagcggaacgaatgagcccccccgatcgctgacgccatctccgagaagaatcgaattcactggtcacaccgacaagatggaaacggcgtctcctcgacttgcaatactaattatagcaggatgttgaatgcgataccagacggatgttgagctaggtgatcgagtacagcttccctggttcagcctccgcagaaaaaggaaccccgagttacattgcgtcgaaaaccaggggttcgaactcgggttccgcacatgacacagtaatccgcacaaagcgatcgtgcatgttcacgtttctttcgcggcagtatgggaaataatctcccatcgcagagctccttcagccgattgacattgagctgttaggttcggtattctggcacaagccaactcatagaccactttccgcttggtgaatctgtcgctgatttgattgttcaccgcggtttcctcactatcgctgctctcatcaacgcccggattcgatgtgccgccgatcatgatcagccgtcgaagcacatgcgcgagacggctgaataaccggagtgttttcgtgaacgaatcaacaaatagacagaaaaacaaacgaatcgaagagaggccgagaaaagacgtcgacggtcatcggtgctgcgccgccgcgactaagactggttcaacgaaaacgacatcagtgggcacatgatctcgattcgcgatgatcgcggagcagtcagtgatgtctgcttgacggtctgttcgattccggtcggaccgggttgtttggcttgagcattcattcacgcacgttaagtgacatcgtcagtctcatcgatgcctcgagcgatcgttgtccgcctcagcctgaccggttctccttctccgcgtattttcgtgccgtcttcatcgtggtccccgcagtttacccatctataaagttgtgttgggccctgtgcgtgagtgtctgtctgtctgtctgtctgtctgtccgtctgcagtctgagaaagctgcgccgccaatgacgattgagcgacggacatctgattaaacggatcagtgttaagagcgtctccgttaggagcgagccagaagtcgaacatttcgcccgctgagataagatcggagtcgcagcctgaatcgaacggaccaatcggattctgggtgaaattcctcacgcgatgatggacgttgtgtatccgaaaaaagaagacgccaccccatgcgcgggttgaccgactgattgactgactaaccgacttgcgttgctttcccgctgaacctcgcacctgtacggatgatgagaatttgttgctcgggggctcacctactcggaagtgttcttctcactcgggaaacgcataagagcgtcggttgctgccacccagtcgtatgtatggatgtttcactacgggatcgcttctgcgtgggcattctcagctgcatccggccgcgagaggccataaattgagcctcggagacgatggctccgtgctgcgatgtgttgcactcggctgccctggatgtccgagtttatttccggacaacctcggagcggtcatccccgaagtctcagcgagaatgacgagggtgaaaacattacgggaagcttcaaggatgcatgcgtcacatcgtagcgcttcgcaacatttagatgccgctcgcgattcgagctccctgaatcggaaacgcggcgagtttgtcattctgcgcgaagccctctcgcagcgccggaatgatggacgaaaatgaattcctaggtgggtccgtgttcgccagatgctgtgctctcgatttcacgcggaactcaggttcgcatggctgcgcgagcgaaaaatcgttctgtcagagttgttcgatgcttcaagcagctgatgacgccagctgctatggtagacactatgattcctgcaagcgaggtttcacagctcccggaggtgtcccgcaccatccctcgctgtatcaaggatgataatgctagagggtggccaacgcgagtcgggaatttcttcaccctccttccctttactccttactggggatcgtgaattttgtcctggaaggaaaaactgaatgggctcgaacttcgggcgaaataaggggtcggatcgacaacggagttgctgagtagtttggaccatctgagaaattctcgccgtcggcaaattcttcggattcggctctcctggcgagatacggggggattgagtcgaggacggggttctgtcaacagatcattgatttttgtgcgatggatcgccaattccgaactctggactgatcctcgccatttcttcagcgaatctctggaatccttccccgcatccgatgaaaccaatgcgaactcgagcggttgactcttcggagacgtttctcggcgattttttggaacaagtcgtaaagaatggcattttttgagccgctctagagaatgcagttctcgaccgattgacgccaatgaggaagaagagagagatgcgatatcctcccagctgtcgatcgcagagaaatgaatccaggatcatttcccactcagtcatgggcaaaagaaggggaagtaaaaaaattctcgatcaacgtataccatcctgtagttgcattcactcttgcgagctcgctggaacctccgctggtcgaccagtcggcaaaccagcaaaccacattgctcataacaagagcgtgtgcgtaagcctcactccccccgctctgagccgctgggaagattgacgatcgagaatacagtgtcttaaatctttacgcggcctgttagttctgaatttaaacaaacttcaaagcgacagcatcggcgagtgcgtcggacagacacctgggcgtccgcgccaattcgatgacccgcctgccttgattcttctttctgtcccccatcgtgactgtgaataagacgatcctttgattgattcgattccggtttgtgggtcagcccgcggtgattctggttatcgctgtccgcggaccgctgtctgttaacggccctaatatttatgacgaccacatcaacttttcgacgaaataggctttgatggaaacttggcacgctggatggtcggtcgatcgatcgatcgatccggcggtcagttagcgggccagcaacgatgtaacgagggtttccataaatattgtgagagaggaagagcaggaggatctcagtgaggtatcgaggctggtgtgaccgagtatttgtgaggctctcggtagagagggacgtcgaagctgagcgcacttagctgtgagtagccggggaaatgctcggatattgctctcggcgaggagggactacaaaaagaacggtggcggcagcaagcgacaccaacctgaagaaaaaggagaagaagatgattcagcatttcaaacgctggtcgtcagcaccagctaggggtcattcagatagagcgacaacggtggaaactttgcctacatgccacccggcttgccgcctggcctgtctgccactcagatttcctgctcggccggctcgtcgggaagccgatcggccagaggcttggctcgtgttggctcactgctcgtccgttcgttgcacgatcgaataacttcgcgctcgagggaataggagaaaatcctctgaggatctttgcgctcctgtgagcaacagggtgtattcacacggccgccgagatgaaaacactcgccgaactcctgtcaatagcggtgggacctctagtcgtgtcattctgtaaactcccgccgtttccggcaggttcgggataaggttcggttatttatttcgagcggatcccgaagcgatgattctgatgcaacgagcgggagatttcgatccggaggaggactacacagcatgagcaacgtggaagcccgcttcgacgagatcgtccgtctatgttccccgagaagaaaattgccttttctcgcgccgtgtctatccctctcccgtggtgtaggactgtgtcttgatacccggatggatcgaaccgggagctaggggcgtgctggagtcttccgaagatattcggtcccggtcagagtcaataatttctcgataataatccgaacgacgtaattctccgcgagtgcgtctcgacactcggaatgtcgccattcaccggggtgaacagtcacgtgctcgaaacatgagaaaggacaaaggtgtgcgctcaaccgatgatcctcgttcaatggacagaacgtgcgaactgataactagcgtgagctcggggattgtggttgccttgacgcaataaatggagagaataccagaaaggttctctctcaaatacgcttgacgttgattgcgggaggggtgtgcgggaacgatgggccgctagcatacgagaggtcctgctggcctgcaatcagggatggctctatgagagctaggttttctgagcaagaagcgctctgtcagtatgtcgggcgcgtcgcatcccgtcgctcgaggagacttgtccacgcttcaggtgctaacataattaaccggaaaagagaaatagacgcagccgtcatccgctggagactaacaatctgagcgaccgactaactggcagacagttttggaccgcgtcaaaaagaaaggcacttgactcggcgaaaataggcgctctgaggcgcgtcggctgcccgtccgggacacttagatgcgcctccgggtttcccggccgagtttgccttcttccttcgccgtcctgtcgagcgcattctggctatgcattccggcctcggatgtcgtcgtccgaaatctcaaaaacgcggatcccatcagcctcatttttggtggcaagcgctgctggatggaagcatttccttccgccgggggatccacgactagcgccaggtccggaattaagagcttccgctcttcatcatcgcgaccgcggagatcaaacgccgctggaagatggaagttgcggacactggactgaagatatgtgactttgtttttgtcgcgctcaacgtcgttgaattatggcgatgagccagagagtaaaaaacacgtctttggctcgccctggtatgttgggggtaattggttaatttcagtcgacttttagacatcgggctcccctctccaactttgtcgtcccgcgtgaatacgtgatcatgatggtgatcgtacctgtggttatggtgggagaagagaccgcacgtagcgccaagcccagcactaatgtaggtcttccccggcggatgcagcggctcgctttctcatttttgttgggctgtggagcgaattttcgagtagataaaaagaggagcgttctcatttctctgaggtggtccctgagcgtgtgtttctttcacattcggagatcctctagaagcattaaaagtgggattagacaaaggccttcgagagactgagggagttactcgggtcgggacgatcgttctcttttctctcgttcacttcgctggtagtcccccatcgtttttgtcattagctttctcgctgaaactcgcttcgatcccggagcattattccgctacgaagacgggagggtgggcgtgtgagcgtcgcagaatgagtttgctcgaacaggggaggatcagacagcaaattttgtgtccgatccccggcgtgaattatggatcaactagagatataaaaatactcgttgacccagtctggatgcgtttgattggtctgtacaagggttccgcggttgtttccgaatttcggtcgtataggtcgtcctagtggagagaaaagaagcgaaccgtcgtcggcctgtttccgaacgcgtccgaatgggattcccgatgtgactgttgcgggccgagtggatgagaaatgacgtgcagtagcaaatcgattagtgctgcgactcggatgtgcagcttattgtctatggtcaaacgttccgctgtgctataaacgtttctcctcatcggtgggcattcaggggcgcgatttcgttttccctcgatctcggatcgcatttttagctcgaacagaagggaaaagctctaatatgtcgtctcttttctaattgcaggacaaatcaataacgagccctccgccgccgccgagcgggcaagttgctaacaatggcgaagtcgaaaacgtcgagggttcacccctgaaggagcagaattcgaatcaggtcgaaacaaatcagcctgatacgatcgttcctccatctgtcgttaacaaccaacctccggtgaacactgtatccgcccccagttcagctcctaccacgaaggatgtgcctaagagactgcacgtctccaatatccccttcagatatcgcgaacctgatctcagaaacttgtttggggtgcgtttagcttagttacggccagaaaccagccgctcattctattatctggatactctcgtccaccgcttctccttctgagcttccccctttccattccccggtatctcaattttttttttgtagcgaactcttcttctttcttagcacgttggcaaaagttcttaacacgagctatgcttggaattctcgagcagaatcgtcagatagcagtgaggagctttttcatccgcacggattcgcgcgctcgaaaagcctcctcgattggcggaagtctcttttcttttcgctgttggttggaatgggagatgctcagtagatgcttacctcagctcagaaggagagtgtcgtggatttacaatagaactcaggagaatcgtccatgacgctgtgactcgccgtcgaaattgaacctgtctgaccgactgtttttctctaggaatttgggccaatccttgacgtggagattatcttcaacgaacggggatccaaggtgagtgaagcagaacggaaagcaaaaaatcagattgtttgtcgagtaacttcgtgaggaccagattcgattgcacgcgacgggaggcttccaatagaggcggttctgtggatggcggtagtttcggccagtcggacacctttatcgacagtctgatgtggaagtttttgcttgattgcacctcgaactcgaacgctccgccgtctgatggaggaaaatgggaggtttttgtcggcgatcacccgtcagactgaggcggctgttctcctgctgcctatgctcgaggagaacacttggtcgagaacatccacgtttttcacctcgaagggtcttttctcccatcatctgcggccaccgagcgagccatcgcgggcattttgattagtttctcctcttcgggctttcggggacggggttcgaagacgatagtattgcttccatgggatatttcgatgccctggtcgcaacgttatgccgttgggccttttgatggccagttggtcgtagcggttggttttgtgggatgccgaaattcccgctgataccgcagtagaacacgaaagcggaaattgaattagtctttagcgacagcgcggcctctcggcggagcccaatcaaggttcgagggacgtatatttactttttcccgagctcatctcgttcgtacccgactgccggcccataagaaagcctctctgactcatggaaacacaaagcagcgaggaaccatacgcttcgaacgatctcttcgtgtgaacgagcggaccgacgcctctcgccccagattggaagaaagcacctcattggcaagggcttcaattgagagggctctcattgtctgctgtccaaccaacagtctcgaaagaggacattagtcactcgttccgtgggatctctggtgtacaatggaacgttgttcaagacattgcggaagtctcggacggaatctcggttttttgtcggaacataagttctcgatgtgttccttatcgagctcgtgtgggcaacttgtatcagagttgtagtttggcgaatagactacgggacttctaaaggaagaatcggaagttttttgggccgtggagaacggaagaattctttttggctcttgttggaataacgtgttctcagcgtggggctccgaagagaacgcgacggtgacacagtcgagaactcccggaactcaaagctccggatcatcagcagctgaggatatctctcgtgccgctccttcgtcattcctggcagcccgagtagagcctgcctaattcttaattgaaaattctcttgtagggcttcggttttgttacattcgcatcatcgacagacgcggatcgagcacgcgagaaactcaacgggactcaggttgaaggacgaactatcgaggtacgttgaatgtcttagtgaagtgtcagcggcttctgacatgacatggtgttggcttgatgcaactggtgactgagttgagactggatgatcatgatgatgatgatgctgttggaaatgttgatgaggatgatcaaatcgaggagaatttttcggaaacgtttgttaacaccttgacggcgatgttctttcatcctggttcaagggtgatctaagcgcttttgtgttttgactaatcccaatcgttctcctgttaaccttaccgagagcgttgcacgacgcgggtgagatagcggtcgaccatctcgcttccatccttgacttacactatcattatatacttttttaatccttattgtcacgattgttatcatcgtcggtgttactgttgttgatgctgcagccgctcctgatactgacattctcgattccgaattcttggtccaccacaaaccttatcattttcattctcgttattcattattattgtagcaaacaatagccacggcgtccagctcgaatctgaaactgccttctttcctgtcctcttcccgtaacggctgccaccgattgtgtctcatctattatcacagttcagcttgaatatgttcgcccccgaaagatggtttcgtacgtcgttgtcccaaaatcgacgctggaattactcatgcttctcggaaaactcgaggatcattatgagtcgcacagtttcgggtgaatttatttatgtctcacgatccacgctcctttccccctcacggctgccttttccacaacttctggtgccctccagtaccattaaccgactggatcgtatctctcactttcaaatctttgcggaacgccctcgcaaggaaaaaagcttcggtctccccgttcacgttttcggagcttggcattataacgctcctttctcatacgttcgaacgactgtcctaccgacaacgatccggtcgtgggttcaaactcagtacctgagtcacgtcctatcttctctcatttccctcgcagaatgagccttctatcgaatactggcgtggatctgtaacttctcaacatttcccgttctcttttggttcgttcttttatccattcttccgatgagtgtgagtgtgcctcagtagctgaactgatgtagcaccgtaaatcaaattaaagcctgaacccaagctgtgagggtatggtgcacaagtaatgttggctgtatgtcatggtactgctagtcgatcgatacactacatactattctatactgtgtattaatacatgtatatgtatgcgaatacatatatgcgtatacggtatagtatacttgtatctacgtatttgcgtattatgtgctctcttgacgacgggtggaagcctctgtagaagtttgcttattactgaccctttagaatggcgctcgagaaatttcctctgttctttcaaaactgctactgccaagtatcattctcacgtgaatgaacgttccttttcgaaactcatccttctctcctatcgtatctggaaatcactttccgcacccttgtgtatcgtctgactgtccgatggaccgattgattgactggcggcgtctgaaacgtggatcataagtatctgcagcgtcagagaccaacatgcatcgctaggtatgggcagctgacgtcattatatcagctttgaaatgcactcttgtgctgtaccgtacatttggccgacttgctctcggtgcttgaccagcacagaggtggtgatggctgcaatcgaaactgagtcgagtcagatgattgtgatgcttgatccgatgacgcctgacacgcactgcaacgccaatggaagcggcaccagatttgggatccggagcttgaaccgagaactgaaaaccacgacttagccaagtctgagctgggaaatttctgccaataatctctcaatcgcactttcgcttatctccatggcgggtcactgcatcttgtatttcgcgcggatcaccgctctctgtgcttcatctccgacgctcactaagttccttgcaagtttctacccatagttgaagaggctctggcagaattcccccaccccccggcctcccccgatcggaatcgtcgcttttcgggagggtttcaacccgtctgagggcgagttcagaatggcttcgagtatcttttggcctcccgctcttgtcgaacgatcgtctttgatcggtctcggttgaatgtgggtatgggagggagtctccagtgcaagcgtctgcaaacgctccagatgaggaagctttgttcgatttaataattcacaactcttctgacgtccatttgtaactcgccatgttgctgctatgctgcaaacgtcttcccatcgggaacttccacctcaatgcacatctgagttaacgtgagtgcccgtcgaggtgtagcagttgaatgtgaaaatgtgtgctggtagttcgacaggtgttttgttcttcctgccagattgggagaaagagtgagagagagaagtcgttgcctggtcttattcgctgcctaaagtggaactctttgccgctccttctatcgtctgaactctcggcgtgcgctgactgtgagagtggtgaaagacttgtgctccctctgctctgtggaaactttacgaattaagatctatttttcaaaagctcactccaatagcaattatgaagtctttgggttgttaatgttgctcatcaccacaattcattcattcattcgttcgttcattcattcatgccgttgttgctagatacgttttcctttcgatctcctggctgctgttactgggctcgtgaacaggaatcagctggtaacgtagcatcagttgatgctggggactctgtgagcactgtttgttgatgaaatggctacctacgcgctttggacgacggatgatgataccattcgggtcgtactacgtagtgttataactagtaaggatgcatgatatatcggccccgacccaagacgatcattactactgcacgattcgaaaatgcctccccgcccaagcaagtgtgcgcgagcgagcgaacgttcgatcggtcgacgtcgttcgccgtgcgggatacttctaacacaggctgtgctaccgccgcaaactctgaatcacttatccttcctattggttgttatctattggactgaaattgtggactttctatgaggaactcgattctattcctacgtgtcatccaaccctgcaacctggccccatgctgtctcgaactgttaatctcaaatcatcgggaccactcgcctgcgctgcccatgaacagtgaagagaacgtcgaacgtcacgtctgcgtttacgtgtctgagctgtttccatgttgtgaactcaaatatctaccactgtaggcatgtccggttttgggcggcaatgtttagcatagcttggcaacttcttctacagcgactatcttctggctcaatacacgaacatactgacagtctgcgaatgatcgattgactgagcgatcattgattgatttgccatgagaccggctacgcaagtgcgaactcctacgccagagttgacgcattctacatgttcttcatccgtatcggctgctgcgactggagttgggacgttgttgacgtagctcgtctgcctgttttgatgcaccctcgaatcatctgagaaacctcgaaagttctgccgactgtctatctgaataacatcctaggagaaatgtttcgagcttctctagagctgcttgcggttatgcttctcgccggacgtttcgatgtcagcgccaaatcaaagcattggcagttcgaatacgggcaacggctatttctagttcaccggagcgatcgactttcgagggaaaagcagcgtaattccgcggtaggagagcatgattcctgacgtcggagaggaagggaagcttgagaattcactctccgagagaatcgctcgcgtaacctcatgctcctagagatctcctcggcattgcttcgacgcaatccaagaataagaattcaggacagctgaaagaaactatgaatgagtcaatcgatcgatcatcggttaaggagcaggagtacacacaccgtcacaaggacagaagctgtagataaatatggagaggatgccgtcaaagaaaagttggtgattggtaacgtttgggcgctagaatcgttttgcttgggtggagtacctcgacctggttatgagtaagatgcactgatcatgatgcactagacgtcgcgacgaagtcctcggagacgtgctcggcgttggtcttcaagttcctcccgaagatgcttgctcatggcggtggtagttcgatgaaccaagccatgtaatgcgcacccgagaccgccaaactctgcctgtttcggatcggagatagcctcttgtccactaacgctaactacagtacgtcacgacacatgcctgcgccgtggtccttacaacgggagtcttcgactactaataatatacaaccaccatcaatcacttccgccaaaaccaaaccaccatttaggacctctacatcccaccttgagcttcgctagagagccatgcttctgtttcgaaagttttctccgatcgcaacaaacagcaacgagaactgttctgtgtgcaactgcgtgcgtgcgtacgtgaggagtcaatcgcctctccgttttctccgatcgattctggcgaactctgcgacacttccccagaacatgcgcttcctttggtcctcggtgtactgtcagaaacgactaaagaaagaaacagtcaacatagatgcatgtgactacagatttgggaaaagcaaaaaagttcagcatggaataattgttccccctcatctttctcttggacctttctctggcagtgctcgccttccgacgtcgtcgcagcgggctccatcgcggctgccagagctggtgtggtctgtgtgtcctgcatcagaaacatcgccacaagagtcgattgaagcagctcgaattcgtgtcactgtggatctatatcctgtcttcgccttcgtcagcgatctcactgagatcctcctcaccattgttgtgtttgtcatggtcgtaggagtttttgtggctattagggacgttcgaatgcacttcgctggtgtgctcgaacagcgggatcggtcacgacgaggttctggccgaggtcgggtcctagttcggttcggtcggtctggactgtatgtgggtccgaatcttgggatttttgagccttatcacactagcttgaagagggttccgctctctgatgcggagcttgttgatgcttcggttaacagtgcattggtgtaaggttactccctctgcttttgttgctcggaaccgaggtgcatgcagcatgattcgaggagtttgaatttcctccacgtgggttgtccgttctccgttttgagccgggcggcttggccgttatcacggttgggagtggccttgatcccgttcaacgcggaacgtgacctgaaggttagcagcccccttcaccttatggttggagcagctgcggactcgacctcatccgccgggtcttccccagctgcttagtctcgcgttcctccacctaaatgtagcccctccatccagggtccgacaagccgccatcgcgaaaattcgggctgagccctctcccccttttcctcggcaccgcttcgtccgcgtgcccgcctaccagggcagggattcggtaccgcttttcagcgactttgtcgagggtgctttactggaaggctttcgcctactcccgagaacggcacggcgtcaaatagagtgcttgtttatgagcaggtcacggagtcgcatccttcgttgaacgcctcgcagcttatgtcttggaaccttcgcccatctgacttcgctttcctatcgttgattcgtgttcaatgtttttagcgttccagtacaacaactattcctagctcaattggactacggtatgtctgctcgcgatgttgtcgctggttaaggtgctttgcacgtcgatcgctttgggcatccagtcgtgcactgtgcggtgaaattttctcttcggcagtttgaattcctggagcacgaatcatccttttggacggcaggggggtcgagaattggaaatccccaatcccccacgggagacgatcgccgcagggaaggcgtgaagctcatgcgctcgagttgttgggtagtgccaccagggttcatgcaacatgcagatctccccgctgcttccaccgtttgggtttggcaatttattgcgtaagtacttcctgctggggtcgcgggaagcctcgggtcagctggagaacctgctaatatccgagatgtcgtcgtcgggttcccgagcatcgaatggcagccctgcaacacatgctgaacttgaacgcatccagtttctgaccggagagggaatagtctttcgaacccattgagctcgcagtttcctctgctcaggtgctctttgtctcggtgatagtttccgccgcttccttcttcaacaacttgctgagcgatccactcgagtcgagctctggttgtttggtgttcactgtcgatttcgtgtcctcgctcttcgagctgttcatcttctccgcttccagaacgcaacgtgattctcggggacgttcggctgatgctgtcgtcgctgtcgatgtgcccgttctggtacaaaccatgatctgggtccttgatcttgttgatgttgaaggtttctttgtttggttgttgaacgtttatgccacgttctcaggattgaagtcgcggtctagggaaaggacgtgcttctgtttaattgtgtttgttgatgtttccgtcgggatcgatattgaggaggcttgaccatgatgaggatgatgctcttgtcaatgcagaaagcatcttgcacgaagcagacgagcgaacgagaacggctggacagcaagttccaccaatctccatcagctgctaatattgttcctcttgttgctatcattgccacgactgctgctgctgtcgctgttaatactaccattactaccgctgcacagaacgaccaacccttgttgtgattatcttcctagcagctactcctcttccactatctgtcctctttgttgttggtgaacttcgagttccgctgtctgccgaccgtagtgagctagaggaagaagatcctcgctttctctcttacaacccctgagcatggtacgaagtcagagggagccactggaacgctgtggtgaggagaggacaggaggagagaatgccgcagcgaagcagattaccgactgaaaccataacggcgacgacgttaccaacaagatcgtggacttacagtgaatgaaagcgaagtgatcggggtaaccgaaaccgtcacaatcaacgctaccgccgctccttcgactgcgacgactatggaccgtctgtcgcccaaaacatcgggccgacggggacttcggcccaagacgacgcaatcgattcttcagcacgattctctgagccgtcgatgcgacaaaggatcgattctggctaggctcgaaagctttaagccaaccgacgtcgtcccccagctcggggcctcaggactctctacatccgctgaggcgaatcgccgaaaagagcgggcctcgaagaagctcaggatcacaacgcggattgagagcgagctcatcgaaccgtgcgaatcggcaatacaacgaggcttagaggcaggcaggaaggaaggaaaaccttgaaagcgaacatgcaggcattgcaaaaaaaacgtacaagcgcgggcaaacagacatgcaggcgggcgggcgaacaggcttgcagggagacgcatacagtgtgcgtatgttgagaagaactgcggcgtcaaccgatcgtatgcgatgaagtaagttctatttggaaagcattctatcgttgtttcttactaccaataattgcccaatgatttgtaatgatgaatacagttgttgttgttcttgctgctctccacatacatacttgagatacgctctgcttttgggtgcacggatatcatctttgttactgctgctgatgatgatgatcttgataatggtgatgagaatgaccataatcacaatgacaaccacaacgatgacgatgatcgacgtgctctcccccgatttgttcactgtagcgataggttttactccgtccattctattcgatcaatcatttgtgtccactcgctacatcaagcgacattgatagataccatgtatagtggtcgatgttattcgtaacgccccccctcacttctcgtctgtttatcacagtgttcccttccctccgctgtgcacagttctactttccctcctttcctttgtgcctcaagccgcatcgtattcgccctccgtggtgttcgcatccctcactgattctattcctgctctagaacatgcggagacgaaatattcgaaaggaggatctttgtgacgtcccggttcttacatcgatgtggttggaattgtcgtttgtgtagtccgagaagacgatgttgatcttatgattaaagtggctgataaaatcggttgggcgttgaaaaacgtttgcttcatatttatgattcctatgcaacttggacaccacgaaaaccgaaggagttccctcggaaacgaatctatcaatgtaaacagagagagagagagagcttcagcggatcggaagcatgcgctcatttgaatgatgaaccaatctcgtgtctgctgcaaactagagtatgaacactcctgagacgatttgtgattgttattttggtggtggctcaactatggcccctgctgggtgcatgaggcaaaacattggttccaacgatttcccttttcgatccatcgatcgtttgtcactttggacccgtgcgaagctcggaggggtcgctgaagacgtagaggacatcgaaggctcccctctgaactcattcgcccccggaattcggaaccacgatgaccgcatgactgtccagtttatttgaccgttcaagttatcgacagacccttgatcgtgggacggaacctttgaattggtgcactatgcttctctcgccttcctccatctactgctatgagaactgccttcaggaagtcgaaacagtttgagacattttcccggaacgagatcgcttcgaaactgagcaggctgtggctacggctatgagagattcagcgaagaacctctctgactgtgaagaatgactgtttcccgaatctcgaactcgggagtcagagaactgttccaactttctcagtgctcggaactcctgaagctcaaacaatcgtcgatgagcattggcttcactcagaccgcttgagtcgatcttatcaaattatggaattcgagagcaatccagctcgatgatggcaagtactcccagtcccgccagcaaaatctacttacctctgatcgactgatgcttccctcgagcagctgggcagccgagttccatgcttccaaataggtatgctgaaatagaactcttcaactgcatctcagtatgtatggcttagtgtatggttcgagcacaaatcacattagcgcgagaacacccgggctggttgtgggtttacttcgatcgtgaacgatcccgaaatcgaacgcggagttgggggaatgagattcatctgaatccggtttcgttatagacgcccgaacgtctccggaagcgttgtcgttcgcgggtgcacatgacggccgaacattggcgcagtcagatccaaccgggatatcagaaccgctctgttcttacctcagtgatgtccgaacttgactcatattccccttcgatcactcattcccttgatcccgataactgatcaactgacgaccactgagctgagacgaatctatccgcctttcaaaaacttttcccccctctgaccatttgcccaaattacctctgagtctaaaagagaaacgcggagagaattctctcattctgccccacactgttcgatgacttcactaccaaataatcacggattgatacgatcccacactaacgcgagtaacctttgaaggtcaatttgtctcatcgacaagtaagtacgaaactgtgttttgggctgtggattggtgacggtggtcttgtggctgagatgtgcgcttacgatctgctgcctcggattaatgtgtgaaacagaggcaacagtggttggattgcggtgctccgaatgccggagttgagctacagtttcaggttggggaagagcgtctgtaaagttggatccgatctctgtgttatccaaaccgtcatcgcactgctctctcaaccgagaggcatctcgaacacatctctggaagtttcgtgtgtggagagcgtcgggtaacgtgaccgtgagatgtgtactctgctcgagagcattgccgatctctcactgtggagcaggcggagttcacatttttcggctcgatctgggggctgcttatcgattgaattctctgtccgttccaaaatcgccgcgatttcagcatagatcagaattgaatcacacgttcacatgcatacacattcacatggtgatgggcttcgcactgtgcaaaagcaggcaccaggcagggaaagcctacaagaacaacaacgtcgacgcttctccgcggaagcaattggaaggagtcgttgacatcctgagcatgaattctgggggcacgatgcctaacttccgaaatgcttatgttgtaggtgaacaacgcgactgctcggactcagaccaagaaaccatcgaactccgcaggtgagctcacagatcagactatggaaaacctctcacgagacagtacatgtcgcgcatacagatcgttacatccccaagcccagtccgactggcgcgcgaaatttctcctttcatgctgataacgtcgctatccacagctaacatggctgcttgtgccgctgccgccgcggagctgccgctggtcgctgcgttgcgaggagccgctctccagagaggaagggccagcgccgccctggcggctcaacgtggtaacgccacagccgccgccgcccagctggcgttggcggccgccgctgcgggcagactcgcaccttcccctctggccgcgctgacagctgcctatcaacaagccgcagcagtcaatgatccattcctcgcagccgccgcctacgcagccgccgcctccggccaaaccggtctccagacgaactacgccaacgcttacactgcggctgtagctaggcagtacgccgccgccacccaaccgtcggcggcagccacagctgcccagctcgcagctgctacgggctatccgacccacggtatcccgaacgccgccatgtactacgccgctgccgctcaagctcaagcccaagcccaggctcaggcccaagcaaatgcgtccgcgtatccagcagctgccgcagctgcccaggctcaggctgcggatccgtaccagttggcagccgcccagaacgccgcagcaatgggacccatggctggatacggggtaatttaacgtctacgtttctctcactagatgaatacccctgcttctttcagggcatgatcgattcagtaccatctgaaattcatactctcgatctcggaagccatgagaacaccgatctcactgaaaccttttgacggtcattgcagtcgatcgccgcccaaacagctgtagcccagaacgcggctgcaggcgcccaagtgggtcaaggagctgcagctgcccagaacaacgcggctcaggccgagattcttcgacgtttgcaacattctcgactgaactcgactctccagaacgcagccgtttaccgaagcggctacaatcgctttacgccttactaagcgaaaccttcatcacgactattttttttattacaatcgtcatcccgcattgtaccattactgttacagttattattttattacaaagcaaccaaatacgctcgaggccaggaattcgtcaacgccaagcaagccgcaggagtctgtcatgatgttgcggctggttcgttgtttgacgaaaggatcggcgaggggatcagtccacttgttcggttcatctgtgtgaatgttgtacggaaacgtatatatatttgatccaacaattgtgttcacacgcccctcgagcacacatctggagagtaccagcagacagtacactagcaaacgaagatcgataacactctagacattgaaagcgaaaacatcatgataaaactatgacttcgatgatggggtgacggcgacgatgatattcatcaagaaaatctccattcagatgcgacaagtggaattggcgacgtggcgatggcgtgcgactgaggcttgtttcgctagctcgagggttcgcgataaacagcccatggcgacagaaaccggcgaaaggatgacagtgttacccaggtatcatgttgaacattctccgtcatgctagtccttgttcggtcggacgaaaacaactcgcgtctgatttagtcaaaacgaaacaaattctatcgagaacacctcggagctggactgtgggtctctaatccagggcatgagcctcacgaattggggatagatctgtcatttgggtgaccagcccactcaaccgcctgctcgccgccgactaagcaccgctgcgagccagttacggcgcaaatgagcgcgagagtcacctgattatacctataattgttgcggagcgtgattgtgagtagggttttacttgttacaacgcaaaactgatgagccatcgatttctcccacctcgactcccacaatcgaccctcgcccacgcggtccgttgaaactcctgacgcccaattgactcaaagagcttctcgtcatgagaaagtgcgatgtcattgttttggaatctcagtttcgatttatccctaccacctatacatagggttgtatgaatagatgttgcatatacattacgacgttcatcctggtttcaatcatattaccggttcgattcttctgcgcaacaattcagttcatatttacctgtttttcctcgatgggcttgttgccgtagagagatttgtgagatggagctcgtcctcctcacgtagattgcccttgccgacctgtcgacaaccatgacggtattctcgattcctggaatggtgttaactgacactgaccactaattccccagtagttgtaggatagaaatgcgagctcagaaaagaaatcaacacaaccactcatgtgtttggacttcgcaagagattatgaccctctcctcactcagcgaagcgggtcggaactttgtgttcaagccaggcttcgttcagaccacatagaaacacaaacaacgaatgccaatactccttttgtttttctaagaaacctcgttgcgcctctcattgaggaccgatcgacagccgggggcactcagacttcaatcaatacctaatccctaactctctccgcgtcggttctacgctcagccgaaacgagatttttacccccgaccaaatcttaaaggctacgttgtcgatggtctacacgcccgttttttgtcctctgttcgcttctttcggactcattgagagatcaccgtcaatgtccatctcaatccaaatactgactcgtattggcgtcgcgattagcgaagtccaaagcctaccgcctgcacttgtattacccgtctgctcccttcaccgaccatccatccaagcaaacaaccaaccaatcaatcattcaatcaatgttgacataaaagtacccacccatgctcaaacatgctagtctgctaagtcagtgtttgtttcaagtaatttttttcttgtttccccgccgtgtgacttcgcgctggaggccaaacgagaccatccgcaccgagccgcagctgacttccgcagaattgagagcaaagtcaccgaaagtgagcatttcgtgagagccgttctcatctcacattcgctcaccttccgtctttcatctacctgagcgccggtggtaacccagtgcgtgtcgatcctggaccgctgaaaactcagtctccgagcggtcggttgttggggctgcgttacggcgaccaccccgcgctcgaggaatgcgggccgttgagatatttttttaacgtctcaaaaacgctccccacgtttgattctccggtagcaatcgtttcggcgattcggttacggggattaaggttcacttctacaacgtcatcctactggaaactgatgcaacttggtcttcttccgacgtgggttggaatggatgaacttctagaagcgagctcgcaaaaccaagtacgcgatacagtatacacgaggaagaagctaaccaacagtgaagagcagcgaacttttagaaacagcggaacattcgagctagaaaaggctcctgggaagccgcgatcatgtctgaacccacacgaagttcaattatgaggatgggacctcgctagttccttagggtaacgaaggaagactggcccgagtagattaacccgactagacagttagacggtgcgttaggcagctctgtagacgtctcgcattgagagcaggagtcgaacaacaagacaaaaacttagcttgacagacaaactcaatcccatactatatcgtacttggtcccgggaatccctgacgagtcgctggcatctgggccaccccttcggtgcggtcgcccagggacctccgacaaaccatagagctaggctagtgctctgataccgtttctcgatacggaacagtcataacaaactaggctgaggcggtgaccaaaacacagaagaaaactcggggcccgcgggacgacgaaagaaacaaacaaacagacaaactaacaaacgaaccattgtcactggtttcgacaggagcagctttcaatgtgtttctccaagggaagaagatagccgaacgggaaccactatgacgatgacgatttccacactcaggatgatggtgatgaaggatttttaacagagattggagctaagcaatcattgacgttggtgttgaagaatcccaaagtcgctccggaatcttattcggccatggtcccgcgaactgcgacgcctgttccaagagagcgagaacctcgagagaacggaatacccggtgtccgttgcggtagggtctgggcattgttcggagcacttcaatggcgttctctcatcagaaaatcaaatcccgatgccaaccgactcaaaacccctcgtcagctcagcccagattggacgtgcgctcgaggagctgttcgtcaaatctcaacctggcgcatcgagttcaagctgaccgaaggtttgtaaagcgtgagcttcgtgaggagcgggatcgtgtgaaccatgggcggccatcttcctcgcgtagccatctcttgtataaaatatagtctcgacttctcaagacgagctgacgtacactgtgttcatttttgcgaataacgagtaataattccgaagacgccgaggaatctaaccaaagtctcccgatgacgaatggcctgccacgagggggtaaacgagctgtcattcttcaccttccccggactctcggcgagatatgatgaacgataagatatttggatgaaaacacacaaaaacttgatcccgtacgaacgaaacactgaagcatgatcgaagaaatctctccatagacacagtggatgagccttgcaccgttgtaacggcaccatcgcgatgaaacgtttacttcgacgatactctcccgtcgttctggataccctaaatactgataacgaaacaattgaagctgtcattatagaacttgagtacattaaacccaacataagcgagtgagtgtgaccaggaaccgggcgatattttgcgcttcaccatatgaaataaccaaaacttggtaatcgatgatgataataaaaaagattcgggtcaaaaaataacgactcattctttattgattcgggccgctgttccgatgaagccatggggcagtggtgacaaagacgcatgttcagctggtaagagtcggaaggttccggagcgcgagttcccactcttcgaatagaatcaattcgttcccttctgagccgggcacatcgctgctctcgctactaacagtgtgaatctctcgcgaaaagttctgcagcaagtatcggaaatggtgatcccgcgacgcgaagacacgaataactctctcacagctcaaagggcgaccgttatcttatctaagatgccactctaagagcacccacaggaggctactttgaggtgtggcgcggtggctgcgaggacgtgggtctgggccaggatctactcggaaggaacaaaaaccatcctcgacgtgagggcgtcggccaccactcaagacactgtgtattcagctctgtcaaggatcaagtgcattttgcagaagtgcatttctcgcttaggggagggggaagttttccagtgacggccctggaaggcgaaacgttcctctacagcgcactgagacattctggttggatctcgaccactggggagtgtcttgtggctctgtcggtagcatgaacttgcgatcagacaggtgtgaaatatgaatgcgagtgatttctagaaaacatggtctcgtttgagtgtaatggagtgttgatcgtttcgaacaaccgagcaagtcggacgtgtaatccgaagtctccgcatggattattctcagttgcccacgagaagatcgcaatcatccagctctagcaacctccacctattttgaaagaatcccgcaacagttcttctggaagacgtcgcagccctaattaggtcacgatgaggagggtagttgtttttgtcgtcggcggacggggattcctccagttcttccgaaacattgaggaactcgccaaccgcttcgcatctcatggcttcaacgcagtcacgatccataaaaccgcgaattgggcgaaaagctgtgcatgaagcgctcacgttccaccttcgacgaaggcggctgtgtactttcttcttgccatcgttttcttccccttcaatcaagctaacaccgcgagatttgtcccttccaaaactgccattgaatccttgggcttgcgatcggatgcactgcgagcatctttcgatatgcgagaaaagcaattagatcgtgtgtttccgctaccgtaagccgtccattcactacatcgagtcttatggggttactttccatccgttggtatagatcaagaggcaagtgtccgccgcggatcgatgaaccagctcgaaatctggagcaaatgaccgggaagtgctacatatcaaagaattcaatgatcggaaggcaaacatcatggccttgtgaatgtgatagatcaatcgaaaaaacatgtcggttgagctactgtgttttccgggattagttcttcagaaagttcatcatgttcgcgctcgttgcttgaggaatcaatctggagttccaaggctcagggagctcggaaaataactcagggtggaactcacgccgccagagacaatcagggcgctcagtataagtctgtcaatcttcaaacattcgcatttgatggcgctacacgccggaaaagtagcagagtttcggattttcggatctgtgatgaggcacgtatgtgaacgccacgtctgaatccgaccgacgatgaggaactcgcgactgtccacgagggggcgatgcggcagggagaagattcaatacagcgcacaactgggcgacttccacggtatccgcgagcagcagtgacttagtttccccagagatggtttctatgatataaaaacgcccgcggcgagcacaggctcaactcgatgatttggaactttgttctcccatctaccaggatcgaaagcttggaagaaacagtttttgtgctaataagaacattccgagcttcgatttctctcggttcgcggtgctggaggtgcttctggagctggacttggaagcagaccaacgttggaaactgttgcgtggaaaagcgaaccttggatccactccgagagggctctgatctttcgttcgagtggcaggattgaaatggcccagccgcaaatgctcgcggttttctcaaagtagagtttcactgtcggccttcatgcttcgagatcgctccgcgttcctccatctagttcttgtcgtttgggttgaataagctgaaccttgagtatcgctgcgtgaatcatctcgatggtcataggagcgaatttgagtctctgaagaaggctctcccactagttcgtgattctcagaggtatggaatggtggacaagtatccaaatctcggatgtgcatagaagttttttgctgactttgactgacaagctcagatctgcccgtgttgactcggataacgtatgaacattattcgccgttgattattagtgaggattatttccatcatgggattatcgttcctgagaatcatcaagtaacaaggctcaggaggttcgcgaatcagataggcctaattgatctcatcgcgtacagacatcgcgagttccgatggcacgattcagtttctcaacctcagaatatttcccgggcatatgggggccaaccgtattgatctcaacccctccgacgtgctcgatgaaatccgcccaggcgacgaacgggctgtccaaatgattgaccaatcaaccgaaagtgttttcttccgatgacacggtcacgctcccccggactgggatgaaggcccctaccaacaatgtttgccaccactgcgtctctcaactgctcatctagcttttcaattttatatttgacagcaatgatgatcccagtggtctgttctcgtgatcgccgcggaatgtgattgtgagcttgccatcgaagcgctccgtcgcgcacgatcgccgcaagcccttgaccaatgtccaaatcgtaccgcaaaagagcctctcggatccattcgtttctatctccaggatcccgtcacgtggttcccgttggccatgaagcggtgatacggatcggtgtaaactgttgctgacatcccgaacttcgaaaaaatacctgattctcccattcagagtgcattccttcctgtaactctcgaccaagggtacgtgcccagggcacaggctccagggcaagtgtggacactagcgttcttcagtcgacagcgctactcgccctgttctgtgatggagtgtgctcctaatttcgcgcccttggttcctgcgacgtttgacggtcacgagcgcaaaatagcgtagccacgtcacggatcagcaatcagagagcacgcttcttactctaagaatgacgtcatcgacgatctcagttcttcattcatgactgacttcgacagccagagggcatagcacgctcccccggggcatcgtcgttttcataaaattctgagagaagaccacagtagatactgatgattttctgcatgggttcgacaaatatcccgtcgaggcggagcatgagccctcctttgtatggcactgtctgtcacggcttccgaagctctcgtttgagaaggttgaccttgaccacggaatccatccaaaatgccaaagaaatgtggctgacgaatcggacgtcctcgttccatcagattccgagagcgaatgtcatagagttcctcggaaacctcggaataccgggggagtctacctgacgatgccatcggtactgaagatcttcatcctttacgaaagatccgcgattatttgttcgaattgagcgcaaccctcaaggatggggaatgcagcttgcggtttatcgactatcgactccgaagggattggcggacgttttttgtgcgtgcgtgatgatctgcaagttcttgaacaacaacgacaacagcaaggaggtcgctcgttaccatggttacaccggaaacactcggagagcatcaaccctgtttcaggcaattccatcgagggannnnnnnnnnnnnnnnnnnnnnnnnnnnnnnnnnnnnnnnnnnnnnnnnnnnnnnnnnnnnnnngagatcatcgtaagagaaggtaggtgttttcgtagagatcgggaggtttcgcggtgagaatgtcaaactctgacgaaattcctgggcggacgcagcgacattcccagcagacgttaggaaccgagttcgaacatcatctaacgctcgtatcgatgcactccaccttgtccggaaagaagccaggcatgagttccttgcagcctgaacagctgaccggcgcgtcgtcctgtgcggaacagctgacatcgcacacgaccattgtcccagaatcgacgacgaacaggtcatcagcagctgagcagactcttatgcgattctcgaacagtcggtattcattgcgctggcgagccatggataagctgtgaacaaactctggagatcaggcctagaagaaattcctgttcgttacgagcttttgctggtttggcgggatcccggaggagcatcggaacttggcacttcgccaattcgacgaagggattcccaggtacgctcttatcgagctctgaacggaaatttccgaggattactcagcgaccatccgcctaactctgttttcggctgaacctctcagccagccctcaggagtgtcccggattcacctttcggtattgcttcagtaacactccctatcgcctcgcaaatccnnnnnnnnnnnnnnnnnnnnnnnnnnnnnnatccgcctaactgatagaagcatttcgtcgagtccaataaccctcctagaggagttttctgacgaagtgattccgtctggaggatgtcagggcggcccagaaacaatcttctctcttcccctcttccggcgcggctgctacgtcttgaattcgggaacctggaggataaacttctgagtcgcgatcctcgatccctcatcccatatattcgaagtgctctcgattcgcgaggatgggtcgccgtgggatggttcgagtgtcgttgtgcagctggttggaagcgcgtcggaatgatctctgaatcgactcgctagccgtttgggagaatatttggcgccctcgtgaagggtcctccggtcggtgcacgcgcacctggtatagcagagggaagtctcttcccaaatcttagaaccggaaagatgggtctggactcttgaatctatttgctctcatcgcggtccatcgtcagtcctaggctctcgtcagggcgtaccttgagcctcacattgactcgatgggaagaaaataactcctccggctgaaccatgaccagagaggaaccgcttcatatcgaaagagaagaggagacacgcgagaaaaaaaaaaaacagaaaatgttccctctttattgtgtgagtttcaccctgtcaatgtgaccttcgagtcggaatggctggatcccacttttctccattttccccgttcacagtcaccgaaatgtctgcgctgagcgatgtcagaggtgaagtgccttgtcccaaaaaagctgaacgccggccgacaccggatagacagtagaagcctttgttcattttgccatgcatcagtccgcgagtctctcctgtggaatcgaatccgaccgtgagcttcccttgattcgcaagtcacgtaatcgttagtagacacgttgtgaactccactcaacgaatccaccgattcgtcactacacgatggagtgtctcaccagttatttaacgaaaatcccaactccgtgtcccgaacaatcaacctttggtagaaattatgagaacaggacgagttcctctacgagtcttcacaactcgacgaaaggcccgagcccagtcgagaatgagccaacaggagcgtgtcagcggccagatgccagttgctgacgtcctggtgtcgcaaaggccgacacccgatccgttcttcttctgtattttcccagagctcatctttctcttctcgatgcgcggtccccgctcgcttgtccacgaggctgctcgtcgatggagaatcggggttcatgcggctgtgatcccttcatgtcccacgcagcgccgtgcgatactcggtcgaacttttcaggttccgcatattgaccgaactgaactttgattccgtttcgctgagcccggggaaaaatccgacttttcgttttctcttgaccttgcgtttccctcgccggacttctctcttgccaacttggccgagcggtgcgcttggcaagccgcgagcaaatcaaccagtcggcgctccgacacacgctcttagacgatacgcgccgaacgacgcgccgtcggaataaacgtcatctcactgcggtgttacctgcgtgttgggaatgcagtcacttcggacggagcctatgtcacgcagcggatcgtgttagttgcagtgaattctgagtggatatttgtgagcgcttcccgggactcgcgctttttcgccccaggaaaagtgaactcggcttggagagactcttccaccgactcagagcctgtctgggagacggagtaacgatggtttgagcgagccgacggattggttctgatcacgcgggaacagactcaggtgagccggcttcaaaccccgaacgtccgacgaatcgaagtcgcgttcttggcgggaacagacttcttcgcggaaagtttattcgaaggtgacgtacagctggtcagggcgcaaggcttcaaggaggagacctcatcgcacctgcggagctctaagtcatcgtatgagctaccgctcaacctgatagctccgacggtcttcgaacttcggggtcggacgagagacgggagaaaactcacgaggtctctctcgcgaaatcacccttcgagttttttttttctgccccccatcaggcttcctgtgttaatgttcccatgagagctctgcgtctgactcccaatcggcacagctctccgttcatgcggcaggctcggttctcctaactgataatgacaaggatgccaactatgtttctcttttctgccgactcggcatccggtgattgtgtcttttgtccgatcattaattgggcaacgaaattgtcctatcggacagaaaagccccgagaagcaccgcagaaaagtcggcatgaccgatcgctgtgttttcctctgagccgacgagccatcgggatcgctggggagattcaacgaaaatatttcccttgttggaaggatattcgattagcgcttcgttcgtgagcactgacactttgtctgaaaaatgtttctcttgaagtgagcacgtctgcggtactcgagacggggttcttgttgaaataatctgcggaggatccaacggggcgctacgggccacgttcctcgcatgatataaggaaagaaacgttaactgactgaaaaacaacgggaggcgggtactccgaacgacacatcgtctacactcgttcacggaatcggatgattctcgtttccagctattaaatggcctgctcccactgcggataatcttgtgcttgagtgtttgttcagaccgttggtggatacgtcacgtgttcctagtggcctcaactgcagcggcagaacggcgatccaatacgtgactctggcttcctattcaacattttcacatcggaacaacacaatacgctacaacaggcgctaacgaacgtgggcggattcttggcgcgctcgatgagtcaccccaggaacgagcttcaaatgggtagagacggttcggtctcctccgccgaaacgttgatgatcgaagcgctcgccagcctgaaaagttgggtccgccgggtcaggtccgctcctggggatcctggtatcgcagagtgatcccccggatgacaggactgttccctctatgctgtcctgtacgaaaccttgagcgcggagatttgactacgcgccactcccatgacgcagaattccggattcggttccaggagtatgaatctttcttgctgtggatgatacgtttcaccctgcgtcgcggaaaacgctgttcaggctactcagaaaaggttacactgaagcttccactctggcatttgttatctacgagcatactctacttgagaaggaatgttgttccggctaaagctctccgaggacccttgcgagatccgctatcctgcgacccaggcacaaacatccgtcactcgcgtcgtcactccgcacgctcgagggacatttcctcgccggaatctgacagtccgatgtctgaatcgtgatttgttgaggatatcatcgtgcaagcagcaatcgagtcaatgcaggctcggatctgtccaatatccgccttcaagttcaaactccccgtatcttctccgaggcgtgctggccggccggtagtcaggcaaacaagtcgaatgatcatcgggaaaactgcggtgtttttccaaagacagcgctgaatcgctctctgctttcgtcgcttccacgttccagctctcgcacgattcaccctggtgatgacatcacatatgaatgcacttcgtcacagaggttctatcagcttgcggatcgcgcgaactgggagcgctgccaagagacacagcttccggcgaggtagatacggcgctgttttccgaaaagaaaacaacatggaggaccattcgaattcggatgcttgggtgatattcgagtttcggcatcgactacgcatagggacgcattccgtggcatcggctgaaaccatttccaatcgaaaggactcgtggatcgctagaatccaaaaccatgagagcgaatgacgtcagggaagacatcatagataaagcatcacaatcgctgaaatggggaagagagtctaataaaataaatgtagaatcgtgccactcggatccgctggattgaaaatgcaacgaaaaaaatcttatcccaagctagaaactttatctgcggccatcgaagcatattcctccggtaatcgcgcatagcggtgggatctcgctcacgtttccatctcggattcgttttgctctgcgtgttgctcgcagctttgacgacttgtcgagcccgagtcccgaccggtgcgtcttttggacgagtcgttgagcacttccgtaactgaggtgtcgttgagggttttgttgcgcatcgacatacttgcgctttgttcttcgaacagtgtcaacacaagatgtcccaaagccttaaacagttgattgtgcgccgtattaattattcagctcttctcgagagctcagtgagcgctgcggcagcttcctgggcatgcagaccaccgacggcgctggttccagataggcagagtcccatgtttgtttataggatgtcaagtcatagccggaagtcatgcttcgcagagaagcgccacccttgaacgatttgaatcagactgcatgaacccgattcatgactcagtcgagaactcgcgttcgatgacgactgcgctattgccaggcattgataatgcgtccgacgaagtctgcgtattgcccagacaggtggcgaacctggtaaatcatctgccggctcgattgataacctcgctgttctcaacctggaaggtaccgcgtggggaaattcaagcacctcgagaccgagcaaacgaggctgcgaacgatgagacgacaagatttcgacgttcccgccttgattctgatacatgtgccccgtgaaatgcgggatggtgtaacagaatccatggccttgaaggtgaccgctgaggacgaagggtccaatgtttaatctaaccttcgtgttttgattgcctcgttcaagtcggaatctgtgagtgcgaaccactcggggatgcattgaattagaacgaatcggaacagaaacaagggagtttgtgagcgatttcagaaagctttcagtatcgtgtttcttccacttttaacttttgagccgttctccgtgtagcggtttcttcttgtgttctcacgcggttcgggggcggcacacagtcagaacactgaccgttacacaatcatgtttccccggtttgctcgtccggccgttgattcgaatttgagaagcactttgattccatacgtgagaatcggtcgacctttggatggccgacatctcgaatcgcagctcttcgcatcccgcttgttctccgagcgactcccagaaaagcgaggaccaccaactccagtcgagaccgagtttgccacttccgcaggatgcaccggaacttcgcgtgtttcctgtcgacactgtttgggtgtcgtcgatcatagttttcgaagttcaatgatgacggccggaagagttatccatggacgaacagtctgtggcgccaccagatcgggatcgctctgaacgactgcagcgctgcaggtcaatctgctctgatttcgacagaaccaactttgaatcatggggagaacattcatgaagtgccagggtactgcgtcaacggaggcatctgacatgatgagtcgttacgtcgagggggtcaaaagggaaacgaagatgaaatcgaatcatccggtcgtgtcttctcgcggaaagtcggttgctgtttcgggtcgactccaggttgaggcgttcgggagcagcttttcgtgaccacgagaagtcctgggtttcagcagctgcagagccggataggactccacgactcgaacgaattcaggtgttggagaacacgctcatagacgacaggaacgtgaatttttccaacctcttcaaagcagccagctcaaccagaatactcggtcggacttccacaaccgtgacccgctcctctccagtagccacccgggcgaaatgcagccggattcatcccggtgtgatgcgtggagctcttgtgacactcactcaaagtcattttcagcttttttcctccataaatttccgctgcttttctcctcgtttataatccttcccattcttggttttttccggtaacttaaatccaaaattcgacaatagtttcaactgcgatgccagaccgctaaggaagcatcggcacgactccaaaaattccgtatggatcccatgtaacgattcgaaaggtccacccttgcgcaacgcttggccacatgagccagttttttctattttcaatggcgaaaatcggctgcgattaagcgtcgcatgcgcggtccaatttcaagtttctaactacgacgatccgatcggatagaaaatatcatgagagaacttcaagctggtctgaatcgaatttcggagcgaatcctgaaactgacgtgttaggattcggtgatggaactcgagctaacgcgcaactagtgatcgatctcgttccgatcgagaaaagtgcctagtttggaatcagagagtgatcagagaaaagagcggatacacagatctcatcgaagaacaactccgggatcgaactgcgcgagaggtctcccgatagctgccggcagcagagttcaaatggtgtaccgtacggccataattgttgggtaacggaggcataaactcgagaggaagtttccaaacgatcggattcaccgcttgagcattagcgtgctgggaataattattcatttcggggccgaatccatttagcatcataccacagggattccagcatcggaatgaaacttccgtcgttttcattacccgcatagttctcttgacgttcacggaaagtgccccgtgtacgatatcccaaattgatctatcgcaggctcttgggcccacgattcccacttcgccttgacctgttgcctgaagggtacaagagaacagctgcgtatccagggggtatccgcttcaaaaatcctgactccacgctatcggaattgaggtttccgacttgaaactctattttcatgatagagatttccgttgaactcgcgagtccggctgtattctgccccctccctcctctcgtcgccaaagtcgtttcgtataacgcatacgtgtctgcactgccatgcaagcgcgcactgttgtgacatgcgacggagccgtgatccggaataagagaaaaccactcaagggagtagcaagtgaacatcttcacttctcttcagtgtcatctccccccggagccttccggtcgaggaggcgctccaccaatcaggggagggagccctaaaccctaagactgctcagagcgagaagagtccgtggcagagccggaaaagagtccacggcgtgtcggggcaggcaccaatcaagagagtctacacatactccgagttgaactaataatatggacgcggacctcatcgatgccaacgtcttcctcagttggcggcaaacttggtgttccgaaaaaaccgcagcgcttgcggttctgatcgcgcgaatcctgggccatgtcgaggcttggaccggggaaatagatgaagcttccggagtctgaggaagttgtcactcgcttcagctttcatatctcttttttgttggaaagaggtttccgagctgcctgagctgacgcccgaccacgttcagcgattagctgtttttgcgaccatcctgcgttgggcagctggatggacgcgccggtggaggggagaccgaaaaaaacttcttctggggttctgacccgggctgaacttccgctctgtcagcttgaaacgtaaacgggaaacactgagcaatcaaggcttctttgtttcgtttcgctaaatacgacaggggacgggagcactgaaaataaaagtaaaatacttgcgtcagttgaatcctgagaacccacagaatcgcggcgctctcattgtctgcgtgcgtgcggccccgaggggaggaggctgttgtgcttctacgttcggtttggataccatgggaaagctccgtgtgaacaaaaagggcgagccgagctgcagttgcagcttgagtctaacaagcctttccaagaggcgcggaatccctcagaccgatgcatgcgtggtgaactaagtggcactttggcggtgtaaacttgcgcagagaacgctccgaaactcggtcgtcgtactttgaggcttcttgcgaagaacggttcgaggctccgaatcaacgtccgactcaccagccgagcgatagaacgagatccaaagagctcaagaacgatttgaaataagttagttgacatttgagccggagcgtgaaatagggttaatatcgagattctctcagcgaggagaactgttgcgcgagccttcagatactggtttgaccggaaattggatcttcggtcgaaacttgaagcggaggccctgtggcatgaatcagtcgaagaacagaatttcaaatgcgcaaacatgagaaggtatacgaacttgtcagaaaacgattcccatcgacgtttccacttttctgactgacggtttggagacgaatttgatgattcgacgcatcgttaccgagtaccatcactcgatgatcgaggatggatcttcctccaaaaagaaaaaatatgggaatcgcatattcacgggaccagcgactagtgccctccgacttttcggaaccgagccccaccgttcgtgatcgtgagattaaggcatttcgagatgcttactaagagcatacgacaattagcagaagaggaaaacggtccaagctgcgaagcacctgagaacgacaggccagtgatgtcgaaggaagatcaatcaaagactcacggatcgaatattcgaaaacaacttgcagcccgttcagatgcaatattaattgatggattggcgaatcaacggcgacacattcgatagatccgtcgattgagcggcacatgtgtgaattgattgagcttcgaaagagtccaaatatggcgactagtccggcgatcgcaccggcacatcagtttttgttgtcccatgttgctcttgctgcagctgtctcgtgttgcgcaacgagcacgcgaacagcccaagccgcgccgacggaactggacttgatagcgttcaaaaagacaattagcaccgcccggacaattgactccaggtaatcaagctcggttgtgtcagccgcagctagtcttgtccggtgtttccttcgcaggatcgttccatatcgccacgcgctctctccctaagcggcgaatcaactcttaatcgcagacgatgacgtatcacgatcgtgacgatcggaccgttcgaatcaatcgagctacctctcggactttctaggaggcaaggcgtcccacatccgagcgtcatcggaatcctatcggatgagcagtatcggtgggggcgacttatgaacagatcgcgtgattcggtcgggcttcagaatcgcttcagtggaattccgctccgctttgccctatcgaatgagctaagatttgcgttcgttcgcttcaagcatccaaggcctcgacaagtggagccgtatcacgattacgcaacaagcactgcggtcgttacaaaaaaatacatgaaagaataattgttctagctacctgtagctctgatagtttgtctcactgttttattctgtaccatatacctccgaattcaattgatctgtaatgattgcgatgaaatgaaagcttgttccccgcccgaattcgagataacgcgcacgtgagcgaaccattaaagttaatgtttttgtttcagaatgttccggccgctggaggttgaaccgatctttctagtctggttgtgtctagtcatcacttgcgtcgctacctgccaacagaatcgagagtacaaactagacgattatgattgcgagtgtgtgcccacgtaagtcttccgagtacccagcttcggggattcgtcatcggaaccccaatcggtgctcctcgaggtacaatcgccgtggtagcgatgaaaattccgtctcaatactacacttaaaagcttccctccttcctcagcttatcggggagacgatgggaaatgcactgctacaccaaaattcggccggagaaccgcggcgagccgtcagcgatctcatcaacaactgacgcgacttggaccgggccgaatctgctcacaaacaactctgcgaacgttgaagcaacggtttcgagtaccgaacccaagaccaggacacaacggatccattcgacgaaactctcacagaacggttctttcatggtacgtgatgcgtttgttctgcttcacaaaacagcgaaggaaggaggaggatcactcggctatcgagaacacaagcgcctgattctaagagaatgcatgtactcgacttcagactttcccgagggcaccgagagaagcctcagtgagagaagtggaattcatcggcaaaactatgaagatacgaatgttcaccatagaatacgaaccaagcatggacaaggatggaccatcatttttggaggtgagctcagaacggcccccgaaccttccacggagacctactggtcatcttcacgtaatttattgaccgttacagatcacttgtgatcggggcgtcatggagataccaggactactgagaaagctggaagcgttcaatgtcatcgatgttggcgatataaaattccaggactgtgctctgccgctaaatgtgacttacgctcagattctaggtgagtgtttcttttgaagtttattttggcgcgcgtctgagcgtggattcatgttggaattcccacctcgagccccaagttcgatgatgatccggattacttacccacgaaatatctccgatgaggactattttcgaacgagacgacgccgttctcaatccaaactgaggaagtgctccgacagaggaacttattttggtattcgtttttcagagagcccggagaacaaaatcgccaagttcactttgatctcccccagcctcgacgcacctatccttcccaagaaacccttcgaagattacgcgcaattcatccacgagttcacagtgatgcagaccaaacaaacgaaatcgagagccctggaggatttcgaagacggtttcttcgaaaaattcacaaacctcacatttctgtcgctgacgcggaacaaaatcgcctccacgaaggcgctgcagctcattccgaacctgaaagagttgaacttgagcggaaacttcctcaggaatctcacggccgaaacttttcgtaacctcacgaagctgcagtggctcgacatggtctcttgtcggatagaatcgattgacaaggacgcattcgcgaccctcgccgacctgagagagctcgacctctaccggaactccctgaaaggactccctgcagaagtattcaaaaaaaccgtgagcctcgtgaagctctcgcttggcctgaacgacttcctgagcggtttacccgaaaacatctttgataacctccgaaagctcgagaacttcacgtgcgaagactgcggcatcgaggatctgaagccggaaactttctccaccaacccgaaactgaacctcatcaacttgagcgggaacaagatatccaaactggacaaagccatattcagtagagcattgcgcttgcgacatttgcacatgccccggaactctttaagcgacatcgaaggactcaccttaccccctcaactggaaactctgaatctggaatcgaacaggctcaggacccttccggcagatctgctcaagtcaacaccgaacatcgtttcaatcaacctgagggacaatctgatcgactcgctagatcccagtacgttctccaaagcgtcactcctcgagaggctggatttgtccaaaaacgcgctctcagagttcggctcccccctctcctaccacatgataagaatagaggccatcgacctgtccaacaaccgtctaaccacgatgccgcccatcttcccattcaacataataagattcgagaatttcaatctgcgcaataacagcatccgcatcgtcaagatggtggcgttccgatcctcgctgaacatcgatctgcgcgagaatcccctggaaacattcgacgtgtccgacctgagagagagctacaacacgaccgagcacgacaagcagaggatcacgtacacgatcgacggtcccttgaagtgtgactgcctcctcctggatttccatcgatattttaagtttttcaaaactcctgcgctcggagaattccccgtacatccccggtgtcgcgacctgccccaaacccccttcagctcggtgtctgagaacagtttccgctgcaagctggaggaaaaccagggttgtccgcagggttgtagttgcgactacacagcggacaaaaaaagtattcgtgctgattgctccggtcagaacatgacagttctacctctgcttcccaagaacatcacggagctcaacttggccaacaattgcttcgaacaggttccagttttcgaggcatatcctctgttacggaagatcgacctcagcaacaatcgcatcatcgacatctcaggcctgaacacgcaacccagccagggctggacgaacgtctccctggcgaacaattcgataagatatctggggaacacgcggaaggaacaattcgaagtggatttagcgggcaaccggctgcggtgcacctgcgacacctgggagtcattagataagtacttcaaagacgtagacgtgaggctcaagagaggagtcgagtgcgataaatgggtcaatgaaacctatctccgggtcacggagttcctcgatgaccgcagctgcatcattggacatcagaagagcatcacccgattcgtcatcacactcgtgacctccgtcgccttcttaatcgttctgctcactgttttgtactataagaaccgccgcaagatcatcgtctacatgtacaactatcactacagtatctaccttttgatctggccagtggacgaggttgaaaatgacaagatgtacgacgcgttcgtttccttctgcgatgaggacttgagcatggtgaccgaaatgacgaacgagctcgagaaaccggacccggttaccggcgagcagagctacaaactgtgcctacattatcgggactggataccgtgcaacagcattgtgtacaacatctcccattcggttcagaactcctgtcgcaccattttggtgttgtcggagaacttcatcacgtctgtctggctcaacacagagttccaaacggcgctgacgcagatggtcaaggacaagtcccacaagctcataatcatcgtcataggggagctgccctcggagaagaagttggacagagagctccaagcgctgctccagaacacctatctcaagtggggcaacccccgtttttgggaccacctgcggtacctcctgccgcacaagaaacagaaggataagggaatcgacaaaacgaaggctgtcctgaacggccatccaatgactcggatactgctggaaagtcgaccaacgtcggcaagcgtgtctcgtacggccgaaaccctcgagaacgagaagaatcgcctgaaatcttttgcgagcggtggcaacgtcgatggctcggacggccgaatcaacgaagcttacgtcgctatcagcacagaggacatcagcgtccattgcgactcgttcaaagacgccaacggagcgagggtaacctcaggccgacatcggccctcatccgataacgcggtgcggcctcctcgtaagaaagacaagtgtgtcagcgaagcctgaaatcctacagaactttaagtttcacgcaacgattacatcacagcacacgattcaatcattgtacatagtgtttccataacgttcgttgtaaatactcgatgtacatagtttgtgacaaaccagagtttgaataaagcgtcgatagaagaagttcacagctccgttttccgttgatcgctccctgtgctgtttttcttatttctcggatcagcgtacctccaggatggggatcagagatttccgtctctcctacgcatgatcgctggggatgcatgcgtaggtcattcgagcagcgagcagctccgtcatgtgagctgggggtggagcttctattaggagcgcgtatgcatgagttaccgagagacgtgtgtctcagtttttgtgcgtaataaaaactagtgttcgtgatcctgctgtacgctttggaaacagctgacgctcgattactttgagtatgggatcattcgctccaccggcgaatcgcgctcgatgcccagactgggcgatgttgcgcacagatgaagggaacggatcgtttcccggaatcgttcccccctcctagaacattgtttcacagagctttcacggataatactgagtacgtttccatgactcgcgttccagacgtcaacaatctgcaaatgtctgcggtcccgatgagccttcacgtcaatgcattggactgagattcgatattgaatggaagttcgaaagggtttcccccgcgttcctcgcgccggtgccgatggcttctcaacggagctgctgaaaagacagctcgttcgatattcaccaaaacagacagggcaatcatggaactggcttatactagacgcgtactggatgttattcgagaatatagcctcaggaaaggtaccataatcgctgcgtgccgtggtttcgtcccgcgcacgaatcaacagccataacacacggctgcgggagcacgcacgaaacgcaaactgctctcgactgtcttgtcgttcgaattttgtgtagcgtacctctactcttgtgtagtccatctcgattcgtttcgtgtccgcttcactaatcaggtgtttgttctcaagtccagaacgttgagccgaggagaaagttccgcacatcgcgcttctcgtcctcgcccaggcctaacagtccgcgttgcgagaaaccgaaggcccatgtcagcgttcgctctgctgatcagaagttctcaagcctcatgtacgaacccgaacagcccttttcccttccgacaactcggatgatttgttgagtcggaactgttcggacacaaaaaaattgtgtgaaaccgttccagtgagccgttctgaaagttcgagagttttttgaaagccttttttgaaagaatcggctcaaaacacgatgcatgttcctccaacgcgtggaaaaggatccggacggccgtttgacgtccccgaatggtgctctgagtgggttgattctgagagggctgtttcgctgtcgttcagtcgctagcggtattgtgggagcacttcatcaacttctgaggcagccccagcgagatggacccagcgaggagttcctattcagcggtgaaacttctagactccgaatttccatgccacgcgcacgagtgcatttggccgtgcagaggctcggttggacatgtctccagaaaggactcaacgctccgatggcgtcgaagcgtagggatgaaaattcgaggttcggatgtgcggagattttcgccgtcatcgctgagaaatgctcgacatcgttcctcatcgtcataagcacgacattctcatgcagaaacgatggatgagaaaaggacgacggcagccagttcacgggtgtgagccgatctgagcgaacgcgtggctgaagtggtcttacccgcagcgaggagcctggcgggaaaggagcgttcggcagctgtctttgttgtcgtcgttcgaataaaagccgctctcgcatctaactgaatcccactgtgtgttcagggtacatagaagcccaagacatacactgtttacagcagaacacagaaatataccggagtttatttaagtgtactttccgatcatttttcatcctctaactcatcaaaatggtaagctccacaaacatttactcgtatggggttgccaacgattttcgtggggttcgtttcgagcggcctcgaatgttacaacttgcgagcagctcaccgaaatccacttttgaggctcagaggtcattgcctcgtttttttttctttgtgtatcgtctcgattcccggttcggaaggacttctatgaaattgtgattcccgcgtcgaacggagcggagtgagggatggaattttgtcagagaggatcatggacgagtttgaaagctgttgtcagcagtgtcagaactcattgtgagaagtctcgatacgaaggcatcgctttattcgaggctttcaaattcgatgtatcgagccctgcataggaaatgctgactcaaacgagaattcccgcgaaaatgagaatcccagaatgctcctgtcatcctccgaagcagtgttgtccagtttttccaatcggtttctcaaaggttagatggagattccatcgtcgccgggatctgtgtgaatcgggaatctctgtccctgagaaagtcgtattaaacaaacgggaaaactgcgattcaggatgttctagagcagactcagttagctcacgaatttgggaaattaacctcgaaacaaagccacacgattgtgagttgaaatccgtcccacccattgtgggtgtacgagcgaccaaacacggccgtccaccaacattcatccaaaatgttgatgcgtgggctttccttttctgctccaaataagggggcgccgatctaaaacaaccgagcgactgggtaacctgttggctgtcggtcgtcttgtgtcactatacgtagatttcggagcgacaaacagaagtgcggcggttgaacgtgcggcgtgttcgaaccctcggcttctcattcggcagttatcctcagagcgttgatgactgcgactcatcacagacaagatgatagccaggaggcttcagccgtctcctccgcaatcgaagctgagatttctgactgaatatacgattttctcgatattcccccgggatcgaccatggcggctcacgcggaatcggatggaaacgaccctcgatgaattgagggagaacgcggtttgctcgaggtctgtgactatggtttcgcgagtatgacatcagatcatagcggggcgcgcctcccgctctgtaatgagggatcccaagcgagtgagcgcacgagtgaagaaaaaaacgttgccgtattcgcgttccttgcagcacgatctggtcggcctgacctgtgaaggccgtcagacaggtaggctggacacagcgcggcacgaaaggcggttggtcgtcaggtccacttacgtcacaattagaagccctgctgctccggacgtgtcagtcgattctgttcgaaagacttcgtttgcgccgctggaggcgaagcgatcgcccggtaggcgttgctcggtcgtgacagaacctgcttttatgaacttgcgtctgatccagcgctgtgagtggaacggaacccggagcagagtgtgatttcgttgtttccgaccaacgtcaccccactcgacgagttttggactggaatcgattcgcggtcgaggatgcgtcagggtctctcttcttcgagactcttggaactcctcgatgctcccgctcatcctctggactccgccttggaggtttccaagtcaccaaatcgaggagacagtcgcctacatgagttggtcgagcggcgtttgaacagaaaagagaacgcctcgagctgatccacaagtcggaggtctcctcgattcgtcggcgaaacgcttcgcgagtccgggaaagttattccgcttcacgctggtggagctcaactgcatcgcggtcgcaatcaacgttcgccaaacctcgacgcggaaaggaactcttccgcgggaagcaattccagtcgtgtttgtgtgaacagcacgagagagcgtctcgtgtgacgcgagacgggttttaccgccgcgctttgtctgttgtttgctcggccaggctgcagtaatggatgttcttagaacgacgagagtaaggagttattcttaagctccccgcgtgccccgtggcggaggaagcatagttccctgctggtgctcgcctgcacgtattggagttctccggtcgcggagaggtgccccgccgagtcagcgcgaactttgaagtgtcattcggtggagctcttgaagtttctgggagctcgcgtccccgcgaaagcgtgtccggcctccgatcaactgggcaagacatggcttcgtcccgctccccgccccgaaaaccaagatgagttcagcagctcagatctaatggttgatcttcgttccagcgtgaatgtatctcggtccacatcggccaagccggagtccaaatcggaaatgcgtgctgggaactctactgtttggagcacggcatccaagctgacggccggatgccggccgataaagtttccaacgcggtggatgactcgttctcaacgtttttctctgagaccggcggcggaaaccacgttccccgcgccgtgtttgtggacctcgaacccacggtcgtcggtgagttgccaggaggagcgaaatcgtcggctgaacgagatgtgggagtttgtgttcccagaaggatgcattcccgccgcttccggtcggttgggaggaggtgttcaggatctccggacgggaatctccttctgagaaaaggtttcccttgcagacgaggtcaggactggacactatcgacagctctaccatccggaacaactgatcactggaaaggaggacgcagccaacaactatgctcgtggacactacacaatcgggaaagaaatcgtcgatctggttttggatcgaattcgaaagctggccgatcaatgtactggacttcaagggttcctcatcttccactcgttcggaggcggaacgggatctggcttcacgtctctgctcatggaacgtctctcggtggattacggaaagaaatccaagctcgaattctccatctaccccgcgccacaggtgagtgggacccccctcccgtacctcccagctccgttgtcggcgaacctgtgagcatggattctttttccaggtcgccaccgccgtcgtggaaccgtacaattcgattctgaccacccacaccaccttggaacactctgactgtgccttcatggttgacaatgaagcaatctacgacatctgccggcgcaatcttgacatcgaaaggccatcgtattcgaatttgaaccgtctgatctcgcaaatcgtctcgtcgatcaccgcttctctaagattcgatggagccctcaacgtcgacctcacggagttccagaccaacttggtgccctaccccaggttcgtaccccgctcccggagtttctctcggctcgttgtccattaagctcctcgttcagcgggggaattcccggcgggaatgcttctcgacggcggagagtaaatatttcccgcatgagggagggttcgcagtcgcccggaaccgaattccggcggtattcgcgctacccatctcgggtcttgtattcttttcggaattacacgactctgccgcaccccgttttacctcacgaccccctcagcgcatcaggctgcgaagttgcacccgcgtgcccggcgcactggccatctggtcggcctgcggctcgtaaattatagccggtttcccgttctgcccagcagcgaagtcattctggcgcaacgtctcgcggcgccgttgcttcatcgcacgagcgaaccccgaacggatccatgcgtccgcggggagcatcagcggactccgggtcgttcatgaaaccagggagggttccttgcgaaacgcgtctcccgtgtctttggttcattcggaaccgcggcgatccgatcaagacagcgatccgactcgctccctcctcgagaacgaatgaacaaccgaacggctcgcctaaatcgctcatccctcgattccaggatccatttccctctggttacctacgccccggtcgtatcttcggagaaatcccatcacgaacaacacaccgtcgccgagatcacgaacgcgtgtttcgagcccgccaaccagatggtgaaatgcgacccacgtcacggaaaatacatggcgtgctgcatgctctaccgaggagacgtcgtgcccaaggacgtgaacgccgcgatcgctgcgatcaagactaaacgaacgattcagttcgtcgattggtgtcccactggattcaaggtacgtggtcgtcctccaacactccatgtttctcctcgtcgatgggctgttgaattcggtggaggatcgggcactggaccgtggctcgagccctcagtcgcgctccggagaattcaaacactcaagctgtcgatcaagttccggcggagattttcccacgggagtcgcccgaaacccggacgagcccggagttgcctagtttactgccgtctctggcggcggggcgagtcaagagaacccacggagaggatctagtcgagtttaatattccttttccgaactcaggttggaatcaactaccagccgcccaccgtcgtgcccggaggagatttagccaaagtgccgcgtgccgtgtgcatgttgtcgaacaccacggccatcgctgaggcctgggcgcgtctcgatcataagttcgatcttatgtacgccaagagggctttcgtccactggtaagcacgattcttctcacttcttattgcgtgtcggatgcacgcgtttaattgtctatcgagcgggtccgacgaatgccggtatcgcggacgctgattccggactgtcccctcacggatccgcgcgtgatggagcccccgagttgtcgacaacggagccttcgctccgattctgttcgtcttcgattctctgcgcgtgccgttgcatgcatacccgattcccaagcagaacaatgtttcgctcgctgatatccgtgcccccgagcgggcggctccgaggcggcaccgttgaccggggcgcgggaaatgggttttccctttctccgatccaccggtgggtgccattcgtctcctagtcctgtcacgttccggcggccatctctccccgcgatcctccctgctccccttttctccacctccacccgaagcggaagggatgtaaccgactctgcttctgctcgtttgctcttctgaggtataacaagcaacgcgcgctgttgattgagataaacgcaacaacggaagcaccgactgggatgcagacggcgggaagaggcctcctcactcctgggagtttgaaagctcacggggctatgttccgagaagagtctccgcaccttcatcaggcctggaatttccgccgtcccgttcactgtcctagtaatatcggtggaagctgcggtagccgcaggtagagcgataaagctcgctggactcaccgaactattgtttgccggaagcgatacttttcaagctcatgcctccggaggaaagctactccatcctccaactcctccggagagctctcgagaggaccctccgttcgcttgtgagcccgagttctctcgaggtccatcgccgttcggagacacccttcagcctcgagccgtcggggaaggggggaggggggtcgactcctcgggaaatggcaagttcagctccccttcgagaacgcccacgtctgtcccctggtagcgctcgcgatctctttccaacgacttcgtgatgtcctcatcggtatcatcccaaaaagcggagatcgaatcggggatgtcgagtcgagaactcaagatcaagggaagcctccctcatctccgagaattctggatgaatcccgacactgatgctcgagcgcgtcggatccgttccggtgagtccagccgaactcgggtcgcctcgtctcactctgttcggcctgtagcgatcgctcgaggaggagttcgctgaagcgatcgggaagaaacgagctcttccctcacggaactcgcgttctctattcggcacaacaatcgacagaatccattagcggcgcccggtcgtttggatcagacgagggcgtcgtcccagctcgcccgcgtgtcagaactctgtcgaggacgccggaaagagctcgacaggagtagaacttcccgcgcgaggagaacggcttcaaacaatcgggtggcaacgttcgattgtttgtgtcgatcgctggagccgaacgattttgggccgccgtcgatatttaacggagtatctccgcaacagtagggaacactggaaaattccggagccccgaacattgctttcgaattatcgaggaacaccccccttattgcaggtacgtcggagaaggaatggaggaaggcgaattctccgaagctcgcgaagacatggctgccctcgaaaaggattacgaggaggtcggaatggactccaacgagcagggcgacgacggagacgaatattaatttcggcttaatatcccaggagcgtcgtctccgaaccgctcgttctctccgaccgagtcgaacgaagaacgctcttcgcaagcttcgagcattggttctcaaaacatttcattggatgctaataaatatgactcaaatcaccctcgcgtgacatcttgggcgcttcagctatgattcgggtatttattcctcatgaaagccccccagttccagttgctgatccttccttttccgcagagtcgtgttgcaaatacaaactcttcctctctccgttcccctccctctgcctctacatgccccgttcgcaacgatcccccttgtgatctgggagcagtgttgcgactttaaagactccacaacattctcgtcaccggcccagaacgtttctggcggcggttgcgatctcccaacaaagtttccgaccgcgggtatgaaactcatttcctttcggcgccagatctggccgcgagtttaccggggatgcgtgtgctcagtttttgcgccccgagtcctgcaaagcgttcatgaactctcacatccctccctctcagtgagctggaaccaccaccagaagctctgtcacagtttctcccgcggcagcgctgctccgacggacgactcggccacggggttctcccggggactgatttcccgcgaggaattcctcgctttccgaacagcgtcgagagcggagtcggaacttctggaatatcgagcaacaagggggtttcaggtgcccttgtattgaccgcagctcctgtcattgatcgagtggctggctggacggcggttcatcgcgagacagttactctttcttaggcataaatatttcacgaggggacggatcgataatccgacagacttttggccggacattctccacgaacccccgttccgactggttacccttccgatacggagaagaatgaactcggaagtgcgctggccgagtgcactgatactcggtctgcacagcaacgaagaagagaaattcaattattgtccctcggcggatctcgggaatcagatcccattgtgatgaggaagttttcgctcggtctcggtgattgtttcgctcggcggtccgcgggggaatcgattcggcccacaggagagcttcaccacagttgaggaacggatttcccggtcagcgtctcccgcatcagttcgggcagtttttttgatgtgagggaagggaaagttcctgtcagagcccgcgtgaatcctgagcgctctgagatcgcacctgacgacacagaattgctcatccgtcccgggcggcaagcatgaggactcgaagccaggccacgacggtcctgcgaagacgccgagagaaattccgctcggcacacacacgtagagtactcgagctcccggacacggaaaagttctgttgagaggtcaatacgctgcttgggcccggttcgatattactccaccctagacttgctctaagtctctggatatttcccctttcgactcgagtgctcttgaagaacctctggaggcaggcctcgcagacttttcgcgtctcttcactcgtgtcttctcttgtctcgaggtgttcctcgaatttcggctcaagtttccctctatggggactgcgatcgagcatcgaagttggtgtccttgtttacgggggaaggggaatgaccaacgctctacgagtgattagagatttcggggagcggaaaagttctcgtttcacgtcgtcgccacagagagatcgtgagtcggcgaagatgctaatctgagtgagtcttgcactgtacgaaatacacgccgatcgatcgcgcatctccaacgattcgagaacgagaatattgaaacgatcaccctcggaccggctggccagattggcgggccgtagtggaaccagcggtggccaccagtagccaggcgatgaggaggccctctgcaggcccagatccaatgctgagactcgctgcatccgatcaagtccgggggaggctcacaagattcggcccaacgctacgctgacgaaaaatttattggagaggaggtatcctccaatgactccgtctccagcgaatccgtgaaggattgatcgaaatatcgagagtcgcttcccccacaggagctagcgtcttcgggattcctcagacgcgattattatccaactcacgaaatctcctgtgggctctgtatcgctgtcaagtgttcctgaccgaggagtcatcagcatggggatccggcatggggctagtcgagcgcctcccaagagtctctccaggaaaagcaccccaccgaattactctttttctcgggaacaaggtcagggaaagagagaatcggagtttccctctctgcgtgggcgagaacggaaatagcagattcaagagataagtcagggctgctttctgctcgagtttcctcatcaatcgcatcctagaattcctgtcactccggaacaggcagctgcgcctgggattttcctcgatacggtttctatcctctagtaagagaagatgaacagaaaaatttgagcctgatgatgctggtgcagaggtagctttgcccctagcatacgtggttcatccccaggcagatggcaaacccaaagaagacaggctctcgagtctactgacaaaggatccaccagaagaggcccactgaccagatcatgcagccgtgccagtttcggactcatgatgtcgagacggtcatttcagaattcatccgaggagttcgtgacagtaggatgcatcatgtggctgcccggctgggatcgattacgggtcccactattcttcgaacgcctctcggaccggaatgaaagaatcggttcctgcagaaatgttgagaagtgaaactgcagtggatcctctttccaggtcggctgctcagtaacgactcctgggcccggcacaaagacgaagatctgttcaggatccgggacaagaatgccctcgttagagtttccaggaacgttcaaccggacgagggtagccatcagagctttctcgttcaattttgcggaggggcagagaggatacaattcgctcgaaagcgtcctcatggatgcgagaagggacgtgatataatatctgcctagtcctgcacacagtgatgtgcggagctattcttagtatctccccgagaactccgcgctcgaggaagattccgccctgtttcacataaggagggttcagccgacacgatcaggaatcattggtcctcgacattttgccctaaactctcttgaatccgaggatcatgtaatttcacgtgaatcgaggaagcaatgagtgcccaccaatctcatccgaacgtatggcttttgagggatcggatccgaagatcgcgtaacttgaacgcgggaggggaagttccgacgagaaagatgagcaaaaaaattgataaactcgcgttcctgaccaaggtgccgacgaattctcacctgataagttgggaggcagggcccacctccgatccgccttatccccattttcctcatgaagtctcaccagagcgacgctgagtgcgatgtctcgcaatcgcctccgattcctttcgatcccctctgagttacatgatcgcatagcgatttgaaatgtctcgccggtcgcgtatgcgaaacgatggtcgaggaggatggtggcgaccaggagtcgggctctatcgtcgtccgatgcctacatacacgaactgaagccctggcgttgcacgtcatgctatagcatcataagtagcattattgtttattcttatttggcgatccagatgcttgtccgcgtgttcttgcctcgtttggtgggatccaaaagctataagtgacggctcatcccaactgaatacgcagcaaccagcagcttcgtgattgggtcccgcggcggtctcgcttttctggccgaacggtgaataaatcgtgccttgcttaccaggcgtatggatgagaagagctcccctcaacgtcgtccaagccaactattccgctcaatcaagtttcctcgcatagcattcaggaacacatggctcagtggagtctcgttcacggaagctctgctaataatagccacctcatacacggcccaccctagctggtactgagctgaacgctcccaccaagtttcgccgccaccacttcgtccccgggctcccttgggtccgatatcgcgatccctcaatgatactctgaatcgggagaggacgttttgagtcgccccccttcgcggtcggcgtctcaaccgatctgttaaagcctgcgccgcaggtcgaaatcaacacccaaaacgaccaaaaacgaagctccgcgtctcccatgactgtctccaggcggctcccgtccatccccgcttgcgcaactcactcgaacagcgactcgattcagaaatatcggagtgatgctccgaatcggccaaggctctacggtgaagggagctcgagccccggaaccaaccggagcattccgttgggtagcggccggtcgcaaatccctttagctgccgttcaggtgtgtgctgacagtcggcggcattcgataagtacgatcgtcctggaggaggatcgttcgaaaggagccccggcgctccgaagatcaatagatgatgttcacgcgtggcacggtcgatggagggaaagtgaaacatccatcgtcgcaagctttctataagcgggggccgtaggtccgaaaattttccatccatcagctcattgtgttcctgagaattaatggatgaggttcgcgggatctgacgacagaatagccggtgtcgaagaggggctcgaaaccctacctgtgctcgacgactccaaacaactcgcagaaaacacacggattgaagcctccaatagctcttctcgatattaggctgctccgagggcgcacggagccgaatcaaatgtgacatcactctggataacgacacgcggcaaagcagagcattgtacgagaaaaaggatgtactgcaggctgagcctcttttctgggatgattgcatggtataaattgaaacacgaacaagtcgagacatgttgaatgcacgacgaacaaacatccccgcggcaaaaaagcgtggcaaccgaatgtgcagcggccaacaggttgcaccgttccggctgccctgaactgttcacaggccatgagagagtggatccgcttgtgattgcgctccaccaaaaattgtatctggaatgtcatgtgatacgtgtctaagatgatccgtcacgaggtaggagcgtgctcttcattaggaggtgctgtggtttattgcggggaagagtttggatgctgaaatttcggggcttcagctctcccggtgcgtcactcatacgcgaaagccagaatccgacctcggatagttgcagatatctctctgtgagagaaaacttctccacagttgatgagaaggagcgaacaatcgggtggacaaaggaatgattttcaagcgtccgagtgaggaaggacacactgagccatatttttagtgctcagaggtttctcagcggaaaggtggttcacaagtctgtctgggattgtgcgtcaaagtgctccgctccctggtgcagcgagaactctcatcgaaactcgacaagaagtggaaacgtgcacagagggagcaacacgctttcttgaataataatggaggctagctgaaagaggatttcaaggtggatatctctggatagcacgtcagcgcaagtttctgtgcgtagcccgaatgtgtcaggatgagttccggtacagccggtccagtaatagattggaagcactgtcgtggtactccgggatcaggacgcggggccccgatcccattcgcttccgcgatgttctctgtcagtccgcctcgactctgcgccgtcgcagaccccaataatccgtgtccagggtatcgcgggtgaatcagactgtcgcctcattgtaggatagcccgccattccgctcggcatttccccgactcgtgcccgtcaggccgcgtctgggtcctctggacgaatcgctcaatcctgatgtccaccgcttctaagttgatttgcggtgcgtaggaatggaggcgttgaactggaaatcttctgagcaaatactacgcggcagagacagcgaggcaagcgagactcctgatgaagatgagattcccccactatcatctgctgggaactggctgcccgaggattcgccgcctgctcggaagtcgtcacagaaagtcatggctcggtgtgctgaagctggaattggcccctctacatggtcccgactccgcattgtaggagagcgaagacatattgaaaaatcgctcttcgctggctctggcaacgccggaattcattccgtcgcgaattctcctgattacggccctccggatgttgcgtgacagctgagaaatccagataagtggccagtgcgctcctcagggccaccggcgacactttgtctgaacagtggaaactacgcgcgaacaggataggagagccatgagttcgtcgagctcttcattggttttgccccggagacagttcaatgtccgagatatgcgaccgccgcatggaaactggaggctccgactccacggagcggaacaatatctgctgcgatgcgttgccaacgttttccctgtcggtgcttaagtcatacggaaaaggcggcgccgactttgttgatctggagagggatcgaagcaaaggttcgttcaagcacccgcggcttcctcgctgttcccggtgcggctcccctgagagaagctgtgaatgtatgcttcacagaaagcatcgcccggggacggattgggaaaagatttcagctgagtgggtgaaattggataccgtgatagagaggacgcccagagaaatacaattgaaatccggagcgtcctcttggaatctctgtggagccatctcggatttgcgaggctcgcactgctcgcgaatcccgtccaagcagccccaaaacccaccagcccgaaaactcaacggcgctgtcgctgggaatcgatcggggaaacatgcaactcctggagtaatcgttacgtccggtgctcggagctctacaggagcgttgaaacacgagacaccagacagcgcgtcgccatccaggaaaatcggagcgttccgtggaaacatgcgagggaaaataatcagcgaagcccgaggatgcccttgagcaaaagggaatgcacagggcccgacatgaaagttgatatgcctgaaagaggaacacggaggaatatattccattgttccgaaaactcgttgttcgtgcagtcgtgcctgtcggccgctcgaacggggagctttcggccggcgatgcaaatgcgacggcggttttcgaacgcgaccgagcaggacgatatggtagttcgtcagtccgcccgggcagggaacaggaaaactgttccccgctccgaaacgggacctcacgagcggggtagtcgcagggcgccgcagtgtcgagtgaatcaacctctcgctcgagacgcacagccggtaaaaaacattcggagctcgcagggacgtccggctggaaattcgacgggaccgcgaatttgggcgcgacacagtccggaacgtcatcttccgggaggaaattcagcttccgggtgaatcatgactgcatgcggtgcacttcacgaggtgagaacccagggggccgaggcggcgtctcaggttcgtcaaaagtctgcgttgcctcaccgagctcagaagggaaggaccggtcgggcacctgttgaaggcctgggagagcttcaccagatgaaggagggtaagcggcgtgcgatcgaggatgacagccgtatgtgcaacaggtgttgttaatgtttcaacactgagttcgaacggaatttccgcgatacgtttcggccgccggtaggaagcatccgttgctcgggcccgtatgttcaaagatcccgcgtctcgtgatgccccgcatgaagtccgtccggccgatcggaactcgaggcagagccagaagttcccgggaagtccgttcggaaccggacttctttgagagtgtgcagcccgagaaacggaaccttccaccgcatcgccggttttggccgagcctcacgaccgcgagcccggaacgtatcaacaggtcgaagcacttacgcacaaaatccccgcgctggcgaggggagagggcgtatggagatgctggctgtcagctacttaacctcagttggctcactgaagacccgcacgcttgcacctaatagtatttcgcatagccagacagactgtcgtcctgtaaagtgtcccgtgcttcatccgtcgtcaaccagcatctacttccacgagcttcgcaattttcgtttgcattgtgcaccgcgcagtgatcatcggaggccgcagcctagagagctttctgcactgagattcaactgtgagtattcttttggtacagccgagcgttcctgccggagtcgccaaatagaacgggttccgtttcgcgaagagcgtggagcgacggagggttttgaaaccggtgaatcacttcactcgagggtgtttgcttcggttacgcaacgcgttcctttgatctgatatgggcgggaggaggagaagggcctacatagtcccgagaagatcatgtgggaggagcgggggacggaagttcggagggactggcgggtgcagctttgttcgcagtcgacacctgccgctagagactcgtggaactggaacgatttgtgaagccgaactcgagcttccggtcccacgaagtgcggtacgtgacaccggtcgtgtcctgtttttagaagaacgatcaaagtgaggctcgggcagagatgaggccgggctagagtgcgctgtgccggaggctcacatcgatccttcccttcatcgtcaatgagaagggtaccgcgggagtatccagcgcgacgggaaccatcccgtcctgattcaggagctcgatccagacgtgttctcgtgccgggccagggtcaacacgctccggaagacaaatgctcactcaggctagcggaatttggtatacagctcctgctttcgatcgacactcgcgttgcgttgctgacgaaggagcataggccgtccgatattattgcaggatcttccccgagacttcgcgccgactgcagccctcgctgtgggccctcggagtgtcgtccagaacgactgattagttggctgcgaacagatgtctcgtcccctcctttcaagcgcaccctcaaagatgtgtctggttgaccgtctgttgtgtggctccgtgagatgttccagttactccgaggacgtccgttgagctcgacggacgctacttgaaatgatggaggcattttcttacaaaacccccttctcagtttttccgggcggtgaccggttcgaggaaccttttctgtcggaatttccggagaggcagctcaactgctgtctgaacaggcattccgcccaacttgtgtgcgccaagtctgatgtaacgcttgagcgggcatctcgacaaactaccgagcaagcgtcttcgctgcaatccgatccaaaatgtagatttacacccgacgagcgttagctgacgagcaacatcacgtcgggctcccgagagcgttcgagttcagatgaccgtcaaacgtttcttcgaaaatgtttgtgtggagggcgaggcaactcgagcgtggatggatacttcgaggggcgtccgtgctcaacgctgtttcatggaaaacttttggggttcggaggcattcaggtctgaacagagaatgaagcgagcggttgtttcaacgagcccagaatagagctggtctgctgtcgcgatttctgaacagctttccccggagccctccgagaagccgcagtagcgaagccgacgtccgaggcagcgcggacggaggaaggcgataccctctggtcgaccgagcggcatactgaaaccgtatcaaagtcccggccgaagggggattcggtcaagctcaaaccgcccgtagaactgccggggaaggaacggaagaaaggagctcttgatacgataagagtaacggcattgcttcccgagcttcttctcgaataaggcgcgaaataacactttgtattcatattggctggaaggctttgtctcaagtggagccggcttctcaccttgagcccatcgttttcttgaaatcagactggacggtcgaggcacggtgggacactctcacggaacaagcgaacgaggatcaccgagtgttcctttgtcgattctgaacttcaacacatccaagtccaggagccagctttttccgggaccagggacgtagagtgcactttgttcgatttgagatgctcatccgctagatcccgcgatatcgacattccagagagacatggccgcaaacgggcgtgcctggcacgtcccccccccccgccagcggtgaaatccgttcgttcctgagaaactcatcgacccgcgagaatgagacaaccaaggaaaagctgaaatcctctctaacaccaaatcctggcagacctgtgcccttcttggccagactggctgagagggagaagagcatgcgcttcgagtgctctcccacggctgcgaattccgtcgggcgtgatttagatcgatatggagggatctcttccctcaacatgagacccgtgggaaaatggaggtgtctcacctctaggatttgagccaatccccggtgtcagacctcggtgacagcctttcagaacgcgggcaagacggaatcaacatgtcgaaccgacatgagaatcctccgaggatgtcgaaagcctcatagtcagtgaaatggagcaacgcagcacatggaagatgcttggacatatatgcgtgctgatgcaggacaacatttgcgaacagttctcgagtattgagaggactgttcaggaggggactctctccatgcagcagttgcttcgcctgctttacgttcaaagagccttgagatggatctaccccctcccggaacttatgagctttcctatgcgcacgaccgtcgacacgaatcgcacagtctccctataaactcgaaggcagtgatcgtttcagtccccagtccgacacccgtaaccgagcacttctcgtaccgctcgtaacaaacgcggcgctctcgcttgcctgcgacccggctcggaaattgtatctgggagcgttgagggcaaccacaagcctgacagattgtgttgcgagccccaaggtgcattacgaggttcggatatcgagcgacaagcgatcggaatgacttcgggcgtttccaggggtcgttgcgatgtaaattgatttcctccctccgtactgaaattttccctcacaacgatgcgaaggtagtcaaactctatgctcagggcgaactcgtcatctaaacgcgagattctgtacttttctcttcggcctccacataaataattccttgtgaaatccggaacgattcgttgcgaatcctcactggacaaaagaaaaacggagttgattctgttcctgaagcacaggatgcgaaaacctggatcgcgtaggaagtggatcgatgaggacgccactcgacatattgagtttgatctcttagcactcggcgtgagtgtggttttcgagattccgcggaaattcgattcgaaagttttcctgcaatcgtcgtgacattcagctgaagacaggaaaacgagccaacctcgacgcacacttcgggagaggcatagcgggccatacagtcgtttaagcagctggtttccccaccgaaagcagaccgcttcgaagtggatgttctctgttttcaagaactcgattttcagttcaaaacgtccaaacctcgctgttctctttcgctgctcgcccactccgctttcaccgatatatcgatttgctgtcggcgttggatccagtgccgttgcggaaacacatttcgaatgcggagaaacgtcgaccttggaaatcactgctgacatgcggatgctcgcactccgaagcatattctcccaactcttccctttcgattcgcgcttccctgtgcatggcgcccccgaacccatgtcgactcctgcattcgagcgaccgagttcgtgagcaccccccccacccgggtcaaccgagcgggagatccaaaactcggaaagcacaggccaattcgcacgaacgactgtttcgaggagtgatcaaggcgaaagtgattcgctcgttgtgctccggtgatacggacctgaagcactgtcccgctgagattgaccgccgtctatcaatgaaacaggcgcaaacgactggctcgcgtaggtgttgtgtgatttttaggacgagagccaacagaatgcaatgttaagaaatacgtacactacaggtcggaatggaaaccttccctcgctcccggcttagtccggccatctcagcgtccttttttcccgaggccagcttggttcggcacgctcgctcaccaatcccgctctgccggccctcggctgccactctggatgtgatcagaaatagggacttcatcaggccagattagagcgttgattgaggtttttccctcgatgcacgaatgttctcggattcgtttcttgaggctgaacatctggaagtgacatcgcttcgtcctcccccgaacacaagacgaatacgactatgatgaaaacacacgaggatgtgttttcccttcggccgatggcggaaacccccgactccgacgattcgccgacccgtgaggagagcagcgatgtctcataataacgcgaagatcttaatccctgaacgtcttcggttaaacagggactcggctctcggtgatcataacaactagacaaacagctacaaggtgaacgaaatgggattattgagaattagagtcagagcagcgacaagttggaggatttttgaggacgactcgagggcggaagtgcgcacttgtgtgctctctcgggagcctacatctctgattggaatccaacagatatagaaatgggaattaggagcagcagcatcgcgcgcctctgtcgatcagggatcagccagccaggcacggaacatattccttcgagctcggagtttcgccatttcatagtgaacggcggttgttgctgcgaggaatccacgcctctggagaaggggtcgcaaatacccgggtccgagacccaattctgcaaccccaactcaggggagatcggaaagccgtggttggtgggtacgactcgatgtctctgaatcatccgcatcgtaccaacccgggaattagagactgcgttccgttcacgctcgtaggcacacagcttgcgagaaactcatgagtaggtaactcctcccgcgagaggagtagttgcgaaaagcgaactcgttccgcctcgggaatattcgatggaaatattggataggtttcgaaattccctatagcaagacaacagtctgaactctctgaggatagaataggaagaatacgggaaacgggggaagtacccaaactcagtgaataacttgaacaactgccacgagtcatccgaaactgaaatacggggagttctcggctccaagaagcggggagcctcgctcgacctcgtctcggcaactggaatccggcctgcctgccccctccccccctatttctcggattctttagcctcgtctctgccgagggacatacagtgaacttgtcgtcgagttgtacgaccgacaagattgggagcgtcgaataccgaatggaattccgttgctccccaatctggatttgaagtggcttcttgaaaatcgacgacgacagatgtcaatggaaggaaaatctggaagcaggatgtctgcccacccggggcttgagcagccaggaaactcattaacagagtttgcggaccttcgtggaccccacttcagctgcaccaaaccaccggtcctggccaggaaaccagctgtcgccgggtagttccgctgtccactggagcggtggtccgtcaaccatcaagcttctcggagaagtaattacgagagctagtgatgaaccaaacgatgattcagtcatccggcatgggtgtgggaattaggcctcatttctcctcttggaagccggtgctcatctccgaattctcgatttttccttcccgatccccctcaactatttcccagactcgttcgtattcacgtcgaatattcgtgggatcgaggggggccttcccccctacccctcatgaaaactcttcactctcgaggtgaaaatcatgttgatttcgccatgaaaagcacgcaacggtgatctccatcatggtcgtcgtcatcatcacatccttgcgccaagatcgagagagaaagatcgagcatccttttagaaccaaccagcgggaacgagcagcctgcctccgaatctttcgcgggagtgcaacttggagcttcgtcgcacttgcaccgacttcgcgcaaacatccgacgaccccgagtatagctactaggaaaacacgggagttcgggtaattaaacgacaagaataacattgccccgacgtgcggagggaacttcggccaagcgaactgtgattttagcgagaaatttcaacaagttgatctgttctggcaacggttcggagaagttttgtcggaactctgatcgatcgataccggaatcgaggtgcccatcaatgatcatcccgaatcatcggttcataccgagcgaaatagaaaaaacggacgattcttccaactcgagtttcgccggacgcggctggaggataccctgcgtgggattcgggataccgtgggcaagctcgattatacggagcacggcacggaattccagcgaggctaaagctatgttgttttcgtatacgactgacgtacgcgggcttactgcgggggaagaaacaatttcttgtaagctccaaggatttgagcgactcatgttgtttcgcgcatgagagcgggactggccgacccacgctggaacgagatggagtgtgcagttgcgggaacttcccctcgcaaatttcatgatatttgccgcccgggaaatcggagcgccggagctgtccatgggttcgacattcgagcaaatctgacttttatgagccgcgattcaaaggtattgatcgagcgtcgaaaagctaaccagcacctctgataacttcgaggtatgtgcaccgcactccaggaagcccagcaagacgctaatcgcacgcgagcacatgtctcacatctgacagctgcgtcgcgtgcggttgactgaggagatttcggagctgaccaaagtagctgtgcccgggtcaacacgtgcatcagtgggtcgaacggtgcccacattcctcggaactcaaactggtgggcttgctcgcttctggaatcgaggggttgaacgaacccttctctcgagcccttccggtttcctcaatggtctcgtcgaagcgaattttggtattccgcacactcggagaatgtgttctatccggctgttccgagttcagcgccagaacttcggtgaaccacgacttgaactttcggtcgattccgctcgtcttcagattgctcatcgttaacgctgtcggcagtcttcggtggaagttcgacctgctactttatcggagcccaccagtttatcgtagatggcgtgcagaatccagcgttcgttgcgtgctcggcaccatgacgttccacgcggaaagatccgccaagttcggttacccgttctccctgttagccacacactgttctcgggtcgatggattcctcagatttgctcatcgaattgaatgtccatagcgaggtttctgcattctcgcatcgcgagacgctcgggacccgcgagcgcgttctgtgacgagtcgctaatccgaggaagtgttcagcattgaggggactcgcgggaacggagagagaaaaggcaacgaagttattcgagctgctccccacgaccgggtggtgctgaggaggatggtcatgagcttcccggagcgggctggctgcgggagaatctccattcatgagcgaatacagcgcacgcgagtgggactcaccacgaatggttgcttgattgtcgcgaaacagaattaactattcgagctgtgaaggccgcgagcaacgtttcccggaagagcaaaactcctggaatggagcacgttctcccgaacaacagtggcaacagttgatggcgagtggacgggtcgcatgcgaccaaccagccggaccacgggtcagccagacgggaagtgagcagggacagagatggaggtgcattagggagcctaaactaggctcccattcgcgaccaaacaaggtttagggttcatccatccgccgcgaaggagccacgtgcacatgcttctcaagtcgctgttatctgaggtcaggtacaatctcccgagaggcgttcggcgggcgaatgttgccgacggaatcgacattcaccagacttcttcgacgaagcactcgcaagctggatgaccgatggactacatggtgcttgcaggacgggaggcggcaagtctgatgttgtcccgcaaaacatccaccgttccaggggaaggcagacttccctcatgcgttctcctcggacgggaccactcgaccatagttccaagaactcgcaagcgttcggagaggaaagtggagacgttcgcacaagacccctggagacggataccaatgttacgagctcggaaggcgggagcgtttttccgtcgtaagcgggagttacccgaagtcccacacagcggcagcacagaagacgaacccgctgtttggcggtggaggtcacaggctggttcgcaagtgatgcgcatacttaaaggggcgccggcgagctctgccgactaagctctgatagggcttgttattgtgatgtacaagccggagcgcgggactgctcacctgaatccgggatgatatcgcggtgtttgttggagcaaggtgaattgccacgttgcatgcacactcaactccgctcgagttcgactccactgcaacgtaactaattcctgaacggctcaggaacgggaaaatcgagcgagagcatgaggacagacctgtgggtcagtcacgaacgtgaacgcttggagccgcggaaggtcacgaggtcagcgaacttcgctgacccaactcactgagccaatctggaagagatttctcgcgcgtcagcgctgaactccacgcggaattcaatatgtgaccattgttcaataatcccccggaatccacctccattcaccggctgagctctcagtcagattgattttgttcgtagcaattatgttccgaagtatcagtcctcgtggagtcctcgtaaacgaacgaagagtcgggcagtcgcgagaacgttataacgaaagggttctcgcgggaactgccacaacatatttccgaatagacaaagcaaaggcagagttgctcgagcactccacacatactagggtgagaacaatgcgccgaaatgtctctattgttcgggatcggacattcgttcccgagcgtgtggaggatatggcgtgattaaacgacggacagcgaaacccgctagcctcgtcttgagcagagagaagcctgccaaccgacggagctcgcaaggtcttccgcgctccctcacgagacttcgcgaacttcgagagagctccgtcagaccgcggggtttagagccccgtttcacggcgggaaggagccttgtccttttggctcgaaacgcaattccgttttccttcagacccctggagatcgagaaatcgcgctaaacagggagcgcgaacttggaggggatgagctgagaaaaaccgaatattcgggttgtcgaagagccggagccgcaccagcttgcgctggctcaagactttgtggtctccgactgcgtccacgatttggcgtcgatttctttggattgtctattaatacaatccaaataatcctgatcctctcactgtctgcgttgtgtcctcttctgcaatctacaaggatgcgacgtgaccgagttcggctgaaaatcccacattacaacgatgctcagccgctgataataattttccactgattggtgtgcaatgcgtgtctccgggaatatgcaagccgggcgaaggccgacaactggagccgatgtcgttcaaatcggatcatgcgagtccgaggatgccgtccaataacgattgccataggacgctcggacgaaactggaatgtcgcaatatccccgatgagagccatggatcatcccccatggttctcctgaaactctgttcttgcccccggctcgcagcattcgctggaaacaaaagctgtgagacactctagtaatccggtcactctaacgaatcagagagttccttgcccagagtccaggatgagacagcattgggttccatgcatctttgacggggaacaggcacgacatgtcgagccgattcatcgacgagaagtccgcaagacgccgactcagtcgattcctctgtcttttgacttcgaacaaaatccggatcgagaatagggcaggaggaacttttgagagctcgagcagcgcggaggtttctgaggatatgagagaagcgaagcacaacgttcccggacattgtagcccgtacagctgaaataagagacccgacatgaacgatggcttctcaggcagaggaaatatgaccccacgaaaagatgtggcatctcctggtcaacacggaattcatgaacaaggaggagggtggcctccgcgaaaacgtcctgcgagatctcgaatctaggagcatcagagagaagggaatctgtcgcaagccacggtgcccagtacaaggaaggattcgcgtggagacaaccgagcttctgatgaacaaactcggcctcgacgaagcacggggcgcgtgaggccctttgtcaagtggaccagtatggttgtggcactcatggccgtatggtaactgcaggaccatggttcgattcaatccaccttctttgggcatactgtgggacgacggacgaaatcagctgctctcgtgattgcgtggtcggacacgccaaaagctcatcgcttaccatgtcacgatccgtcgcccgatggaaattgcggcttgggaaacgccgcaacataatcgaacctgatacagcgtcgcagtgagggacgtgctcatttccggcgtagcgcgatgcctccgaacgcgggatgatcgtggtaaatgtgagcgtattgatcgatggtgatcgagtcttacatacacactgcggggcctgtcgtttccatttattcccatagcgtttggtaacattcatctcactgaatatggcgttttcaaggtgttcaagccgcgccctgaagatcgctccaagttcttggaatgagatacgaagagtcctggttttcgccggacacctggggatcgagctctcagcgttctcgacgtgctggagattcctacgtggccaagttccgagcgagcaatctgttctgcttgttttgcgaggagttccctccggatacggttcggaatgagtcgagctactcttgccaaatcctcagtttgcacggcaaactggatcgctccttcccacagtttgagcctgagaggagcagtttctgggattttattcccgccggtcgccctccgcttgctcattgctcgaggaaagtagtcgggtcacacgataccgccgcgattccggccgctgacggcagaagcacgggaacgaatggaatgtactagcatggtccttgtgcttcccaattcacgttcccacccccgttctgaaatagacgactcgggccattcagaatcaggttgtattaagcttgaaagattcctgggatcgaacaggtggctcgcgtggcatagagctaagacaggaccgatgtttctccggaggaagcagctgtgtgggttcgatgaccgcagtcggtggatcgatcagaatggtgccgactcagaacgaccagcaccgcgagagcacgtgttctccagctgaccgagcgtctgcctcaaccgaacgcacgttagctatgcccacgttgctgcacatcgtctcgagaagtgaacgtccaacgacctgcaggtctccgaatcggactggcctcaacggggtcgaaaagtgcgactagaatccgttggatctgctctttccatccgaagaggcaacttcgcgaatccgaaagctaattcagcggaaatgtaccgcaatcaaactgaatcggcggtgagaagaggctctccaaatgtgttttttaatgacatagcaatatcgctcgggttccttttgtgtgagttgcttgggggagcaatctgttcttcaggttgggaacgtcgagccgtcgtttgtggggctgcctgttctcccgcttccagcgctcccgagagacttcgtccccagttgtcagcgactctcgaaacatcgcgctcacaaagagttcgtcacctcgaaaagccttttagagccgtgggatgccgttgcgcttccaggagcctgaaactaatccgcgtggcagccaggtgccacagcagctgtcgacgaccgcgataacgtcaacgagtaaaacagtgcgcccaatgataccgccattcctttggatcgcatagaaaacactacgatgctgtcagcggagcccttgtgatcacactccagctaatgctattactcgcagagttgttgttaccaccccgagcgctcctgttatcacccctcgagctgttgtcatcgttcctcttgccgctgtaatcactcctggcattcctcgccaagttctcgctcgtcgcccctggagagtggttcctgcgactggttctgttgtcgtggcacgtccgtctcattccttctacgagtgctactgcaggtgggagcagccgggagctcgtctgcaggatcgatagtctaaatttagcgccagagacggtgtgactaagaacacaaactcgtcgagcaagggcgcatgcgaggaaggcgaggggccattcaaaccgatcgggccacggcgaggaagttcgggaatcgggaggattcactcccgtcgcatccagaggcacttccggtcggcctcgagcgaggattcaaagccattttccctcgaacggagtaagtgggcaacctggacagcacgacccggagtcgttcgacgcggagggacgaaagtcatcctcaactcctctggcactctttccgctgcaacctctgcgcgcacgcaatcgaaacccgtcgacttggctacgatctccggaccctgaacgctacttcaacgtcgtccgagcattgatgttgcgagcggagcatttaccgagaacgcgggggatttctgctttcaatcaaaccttctgattagaactcgagcccactcgactccaattgaagagcgctcgctcgaccggagccgatgatccctcagaaccgaactcaaaagacctggagactttcataacgagtcggcgtcttgattggactgcaatccttcgctcagagtttcgaaagcatcaagtttctcttgcagggttctcctccgtccctcaatagagtcaacctttgcttttgagttccctgaaattatccttccggccacattgcgccgacggttcgatattccctcgaaacattgaacgaagcttgcgggagtggtgtaggcctcgatctcgctgttcagcgtagagcatgtcgctccaacgggctcagtccccacagctagctgttccggcgtcctcgttctctcccttgtcttatcgatgccttcgacgctcgccattgtttgcagccgagggtccccggcaacaggtaaccgattgtcccgagcgaagagcgtgaggccagaaaatcgagggaagctcgagtcaacaccgcccggaaggtcgcccctgaactttacagttcctccgtcagagacaatcagagcaagctttcactatttccaccaacaagcgctctcgtccgtccaaccccccnnnnnnnnnnnnnnnnnnnnnnnnnnnnnnnnnnnnnnnnnnnnnnnnnnnnnnnnnnnnnnnnnnnnnnnggacaaaattgtacgaagcttaacgggatccttactcatgatgatcttccaggctctcgctgctctctgtcagcttctagcgggggcggacggcactaattacaattactgttgtagagaacccagctctgtttttccagcatcggtcatggcggcgccgcagctctcgattgttgtttcgctctcaatcacccgcgaacctcgagctccacagttgggaatcggaaccagagttcgcacacccgccgccgccgaggctgccggtctgcgagaatatccgcagttatcgtcaccgcggctgcttaaattgtccatgactgcgccaaacgacactggcgcagctttcggcgagtgtgaagcattgcatatcatgtggaagtcatcacgaaggctggctgttcagcgaactaacacggtcacagtcccatgagtcgttggaaacgacgcaaatcatctattcgatcgattgaccatatcgataacggtcaacaataagagactgacgcgtggctgggggctggagacgccattcggataatactcgaacagagtcgcacagattttctaacattcgatcagagcagagatcgcttggatgaccgactctgagaaggtctccatcgagctgtgtgctgagcatgatctaaaccccgcgcggcagaccctctccataatcgttcctcagagagtttccaataacacgttcgctctcagagactcttcatgcgacactcccattgaatcgcggatgaaattcgagcgttccttgcaatccctgcccccgagttacccaactcgagctccctctgctcttgcagaacttcgccagttctagaagggagcaatctgaacgagggaattcagctatgctccctcgtggagtaagtcggtttggatcatcacgaggtaaaaaggttccggcagctgctctgtgacgaggaacggcgctggggacattgaatagccaaagtccgcgtcccggctcccaagcaatcgtcccccgaatactgagttccgcaagatctgggcatgcggctccgcggaagagccagtccgcgaatgatcgtaggagttccgggttttctctgaaggtcgtcggagcccactggttgcgatccttgctctctggttcgagctcggcgattcacaggccacgtttgaacaggacacactaatcgagagagctggtggaaggagccccaagtgaggaaatgatatcgcggcccccccccccccctcacgaatcagagagcccagccatgagagcgaaccgcccgtaaggcactctccgtgaacgttgacgcaatgaatgaccgcgccgcgcttccaatacggagactcattactttaccggtcgctcttgagctggaaatagttgcccaccgggagagagatacgcgtgctgcgggtgacgtcaatgcgcctgacagagttcgtctgtcggccatgcttgatctctggggtcgaagttccggtgggttacgccaagattgccagacccggctcccctgttggctcccggttttagggcgtcgtcccggtggccgtccccggtatccaacaacgcagatggaacacgactccgcggtgacggatcggctctttcgtcaaccaacggagttcctcgcaaccttacatgcgagaccgctgatgtccgggacaagctttccatcgggtctcctgcgctgtcttctgtttccagcgaagttatcgctaatccgctcatgagagtgtggaagagcggaggctctgggccggatccccatccggctggcagacgcctggatccggatctgcgagctcgaacaaaaagtgacattgaagcctgaaaacggcttcgatgagacttccctttgatctgctctaagcgagctcttcgccgtgcgctctgaatggctacgcgctcggaattttccgaacagctgatcgccagcactatccgcgccttaatcctctctcgtttgattcactggagctccccgtccagagactcaatctgcggcggaaaaattacgaataagagcagatagcggaaactgcgaaaggcgggaaagtcgcgacacgatccgacaattttcctttcctccgggaatcgtctcaacggcttgccatctccaatttgtggcacggtttcaaacgagtctcgttcgctggctcgcattcgcgggggccgttattaaattcgggccagaaccgaggacaaaccgtggggcacgacgttaagcccgaggtcctgacttcgttcacgccagacaggtaggcgcactccccagcgcttgacgataatcccattccgcagagaaacagcatcgcgggcactggaattgaattcgtggttttgagcgaaaactctctttttgtctttgcgcgtctggggagtagatgctgcagcaggataacgcgccctcgttggagtcaatgctggaaggcagcaagacgctgaaccgtggaactgattcagcaactctcgttgcgaacaggtagacgggaggaaatcctcggggtaaacagggctcatcgcaatatgccacgaagcggaaacacaaacccgagttccgagcgaatcgtccgggtgccgtcggtgatggagtcgagcagatagaagttgattcactcagcattcgctgttctgaaacaacagccgaggcagagctccttcaactgcgacccgacgtcgctccactccgagagggcccgtttgggactttgctcgcgggcagaccttgggatcggagcttgcccgaacctgttcgctgttctcccccatcttccccgttgatcgggagtgattatcacagggaccaccggtccttggtcggaccacagaggtctccggtgtaaggccctcgaggggcccggtgctcgcctgacacaagctgttatcgagtgtctcgagctacgaagcagccagggcccagattatgagagtttgcaccacgtctggcccgtgagaacgacgcagctggcgtttagaacctcatgacttgagggcagtcccagttctacggcctcctcagtgctctccgagaccatttacgcaaatgtcgcgaggaaatcggaaaccggaggagaatgtttgccagttcataccagacgactcgcagcagcagttgttcctcgtagcgtccttcgtgaaattagaaataacgccacgtacagctgagaagtttaagcaaagaaaataacaacgtcgctcagaccacgcatcgatgctctgccgtttcgatccagttgagacggagcactctattcgatgtcagcccgaacgcttcccgagacagggaagaatccgcgtaccgatcgaacagggcgctcacgaatgctccgttcggcagtctgctggagaaaagtgggatggagtggaatcgacgaattctggaagtcccgagcacaacgggagtttgttccatcgagaattgctgaggctccaatcacgtcaggactgtatctcctccttctgcgttttccctcttcgaagcgatatttcgtgggagcgactgtgaaagtgtcgctccacatcgtaccttcagataacttccagtctccgtgatgagggttctctcgacacacttacctgtgataggaaataaaccctcccagagaatctactcagacaatcgctcccgccccgaattccagtgcggagcgcatcctgaaacgcgacgtcgtttgtcagagaatcgccccccagggctcggaacggctccagagcagtgtcgtgatactagttgtcgtcatgcaggcgagaagtgcgaacgagatataggtcctcggagatccatcagtccattcggctgcaacacgagacgcatcgatacgttgttcaaacggaggtgtctacagcggacttacttttcgtttcagctcctgtgatcaagaccgggtcaggcttggccagacccacctctgccagaaaattcttttccaagatcagtattcgagtttcaacgcgccatggcatcccggcggtgggggcggcggcggcggtgggcaacaaccaccacagcagcaagacactcgagaaagactgctcgaaagaggggatttaatgctccagcaataccttgggaccgggcaggctagccctccccaacagcagagctcccagtcccggaaatttcgaagccactccgctgtcggtgagttttatgtcaatcgcttcttgcgtatcataaacagagaaacccccggagaatcggattccaagggagcccgcatctgactacccggactgccatttgagggattgcgtactcggatgacggcgacttttcccggcgttctcacgtcatgcagcggtcgggaactctctgccgggccgggaggagcgggaaacagaaccacagttgtgctgaatcaccgaggaacgtcgtgagacacctcgattcccgctgcaacctctgggggtttcgcttcgagtagattggcgactgagtcggaggaagagaagccattgtttggaccacgatcggtttttgatcgacgactcgaacgacccgctggatacatcgtgtcccggctctctaatatgatgggcggattcaacgagatcggaagagtgtcgaagctgttattccgacgaactccggctggaactgagccggctgctctaggtgataaaacgaacagttacgagcgcgcttgccgtgccgccggcggagcagttagtttgcgagccataaaactctgtccccaatgctatcgactctcacgcacaggcgggatacctccttatccgattgcgttctaccagtcaatcgccgacttgaggaagcgcacggcggagggaacagtatgccggacgagttttccccgctaactgagcgggaatcgggacaccgacgaggatccgggactcgccgagaataagcgggaccttcctctcacgtgtcagaacgaggaggagctggaaaagcagacaagaatcggatggtggttgccgtatcgcgaataattcatgacacaccgatctgagtaacgcagcagggagagggagagccgagagacgagctcgggcgccaacgacgttcgcgagagggaaggagttttctgaccaagttgattcaagctggttatgttcgaagcgtcgcatttcaatgcgagctgccctctcgctcggtctgagaaacgcttccagaccctcatcggaattgaacggagagaaccgaagcgggattcagagaacaaaaggagcagcgacgagtaaaactaggagtgaggttgacttcggcgcattcggaccgttgggacaggcaaaccaacgaatgagctcttcgcgtcgttatcaacgcacaactagctctcgctcttgcagctcgtttccccctgaaacctttctcgcaatcttcacttcactgtgctgaggctccagcggcttctcggaggaattcttggaaggaaaaactgaggcgcttgctcccgcacccggtcgttctccgggaatcccccccccccccacagactctttgaagttcgccgatttgatggatctgtcgattgtttctcctgagcacttcctccacggagagtcttagagcgactttgtgtcggagcagcgctcctgagcgccttgaattttctaatgatgaatgccgtctctcgatcagaaattgttctggtcggggttttcagttccgtcatctgtcgcgttcttccgaaaagccccatggctgagatcggaagccggagagatgatatctgcagcagatttaaaatgggagcaggaagtgtgcattactgactggcgatgcacacagatctccgaaatgctctgctcgaccccgtcaaccttgggtcctgatcgcgagtgtctgagaacattaggaatccacgctcgttccgtggttctcgaattctcgtccgcctggtaatgggacttctcatcgagcgccttgaacgacggggaaatattttttttatttttcagtactgaatcaggggcggaagttctctttgtgagaggtctcttcgattttcggcaaccgtccctacattccgaagcgttcccaggaggaaaactgaagaacaagaacaggcctctatagcgttaggatatcgtagaattaggaagttgcagagcaagagctcttatagcttgcttcaaaccctcatgtgtcaggaactcgggaatatccagggagacgcgcacgacaccagatgtgtttgacaatgcccgagttcgttctccgcggagcatcataaattctgaggatgtcggcgaggatgcaaaactagcgtttgggatgctggcatcaacatgcgtctctgtttgcaatttcactcccacctggagatgtttacattcagatgtacccgcttgcagacgaatgtacgtgcatacctgcatagaactgagataacaatttctgtttgaagaaggctgacgttgtgcgccgtgaaacttcgtgtttgctgagagtcgcgactcctctcccatcgctgctcgtttattgtgattgtgccaacttcctttttcatttttccaactctgtccgtgcacgggaatccgactcctccagccccgagctttcggtggaccgttcgtcgaccaccctcaagttcttgaatgatccgttcctctcgcaccgggagaacatggaagagaacggcctcccgatcgccacgaataggtgggagtagagtgcttccaggttgcagagcgctgcgtttctgctttgccgaatatgaattcgttgaaggatgaggagcgttacttatcgagaactcggagtccgcaagtcagggctcagccgacggagcattgggaccagattcggccggaagagcttataggtctaactcattgctcccaaaactttttggcaatgggacacatttggaagccccctccacccacgggacagctccgctcccctcatttggatcggctcgtctgttgtttgaagctcctgtaatgttatggagtttggttcaacggtcacaccctcacaaagtgctcgttggaggctatttctgtatgattcgctcgttacaacggaaactaggaaagcggctccagggaaacatgctcacaaataatacgaacaacactccccgataacgaatcagaaccgtcacccaggttagagtggtcgaacggggaatttctcccagcctgcccccaaagttccagtcgacgccggtccgcccccttgggaattggaatctaaatctggtcatgacgagtttgggttttcagttctccctagagatggaggccgtcaagcgacattctgtgctgttcctattgtatgaagtcagcaatgcatggcgccaggacccgacaggcagggggcgcactagttttactcggaaatcggaccgtgaagcaccggaaaatgggtttcgggaccctgttcgagagccacgggtctaactaacaacaggcgtgttgcgagcgctggtcgcgtcaatgcgctcgaaagagctgcaagctcgatgtctcccaactcgagccacatttttgttgaacgaaaaacggaatcacttcattgtttttcacacttccccccttatttatatggtgcaagataggagtaaatcgtggagggcacgtctgtcttgttttgctcctcaacgtcgctcatcgatgcgtgatggatcgatgttaccttacctccgtctcgatcgtttcagtcctgtttttcaacgccctcgagtctgcttcagtcccggaatccaaaccacggatagcgttccaacgcgaatgcggtacatctaaatcccatgagctccgaacgatcccacgtatcgagaagctcataattacgggaccggggatgtgaaatccattcggaggcgtcttaccgaatacttctcaaaatccctgtctccgaattctgacaggaactcacagggtaggagaggaacaaggcctctcgagtgtcctccgaggttttctccattggtttactaatgcaagcggggagtttaaatcccaatcggagtgattggaatgacgatcgtttggaagcgagatccgagtgttaccaaaacctgctcgccatgcttgatcaaacatcttccacaacgtggttcgagacggaagccgagcggtttatggagcgacggaccctgctgcgacggaagagctcttcacatgtatccttatcaggatggtgcagtgactactttgtcgatatcaatcgcgtcgtcatcgaactcatctggaaaggcgcatcgtgggctcaaatgctcgaccaaccatctcgggatggtttccatggtttcaagttctcgtagatgtcggcatgggcatggaagccacggctcatctgcctccgtttccttctacagctacacatcggagttacgcctcggagccacagcttggagagacagcagaaagatcaaaacagaacacatggtccgatttctccctcgttgcaacgatcaggcacattcaatcaaggtgcaaatcgtccacccaatcgtcgggtggttcgtcgtctgatacgaagcttcactgcgtggagctttatttgcctgagggaattttcgattgtctggatcgtgcgatcggaatattcataggtatgctcggttgctaagaagcccgactcccggatgagatcaatcagtcagagtggaaacgggggagtgttgaattattctggggtcgaacgaccattcatttcattagtgcagtcacgagtgggagtagatttcctgagtctcttccttctggaaacttctctactccctcagattaggggggggggggatggctaacaatcattatccggaagggaggggagagaaatccgctgaatcatacgttttttttctcatttctgaccttgtttcggaccttcttactatgtgctgtgacatggtagcagactccgcgtattctgagtttgtagaccacgacaacctcaggagccgacaatgacaacgcccatgcctaccatttcgacgggaccagcgacaacgacgaccgagtacgcttccaacgatgacgacgcgaagtacactcccgctgaatatgcaaattcgctcacggtgaattcaaaaaaacggagctctagccgcaattccctacggatctcttaatggatccgtgcatcgaagtcgggcgaaaggaaagggaggacgaccgcgcaaagcttggccgaacgggaaaagcaatgggaagagtgccagcggggtcaagggacgttttcaaattaactctcaggaggattttccgaggcccagtcgaagaaaggatgttcttttgacagcgaaatagagatggagtgaatgaaaagttattgacaggagtgagctttgagatcgagggagccgcatcgctacacaggattttgaatctggagcgaggtttgcgagaagcaaacgaggcgcgagggaacatcgattgaggtgtcgggaagctatgcaggatagagggccacaaaatcttggaatggaggggaaagtgaacgtgacgaagagcacggcccaaatatgaggtggagctgcaatgaatgggaagaggagacgtttacgatgggcttttctggaaagcggagagttccgtcgtttacggcggaaaatcggagctgatgcagtgtactgtatggtgaaaaaatggcgattctctgaattttcggcggttcccgtgaacctgtgtattcctgtagcacgaactgcgtggaatccatgggcgagatttgaatctgaagcgaattatcgcatgttgtgaagatggcgtcatggggtttcacagaaacatcaggatggcgggctctaatgtctgaaattagatctcaggtggtgtctcaataatctacagcggaccattgtcgatgcgccttgcatcgagcttaaatcccgcgcgcaagcgttcactgagaagattaacgaatgagctcagaaaatacagaacacccgtttccgtctccgagtagaggaaaaccgaatctcgcgcgaactcctcggtattcggaggaattgagtgaatggcggagttaaaggatatagaacgcgatcgagcaaacatctgacccgagccaaactgcggtcgcgatcgacctaaacgaagaccgaaaccttcgatgaacatttgtactcttttatttttattatgtcaggctgacaaaaacaggagaggggaaagagcgtgttcagacactttttgagcagaatatgtgaaatccatgcatccgaatggcgttgggacagtggtaccgtcccgacaagcccacaatccttccaatactcaatgcttcaacttcggttcgtgggaatgcaagttcaggcgactgtcaagccatatccatggaggaagtacgcaagctatgcgcctcagatgtgaatgagaatcgggaaatgagaaaatgagagagcgcctagagcacactcatgcgctcattattcgctatcagcgttgttcctatgtaattttgtttctcggagtacttgatcgacattcagttccagacggaaaacacgatttttctgaaatctaggattccggttctcggtaggaacgctacgggagtttcgtgcgcctggttcagatcccggaagtatatgtgactttccgaaagtattctcacgattgccagagattgatccatcacaatgaggggaaaagttcgaaagcatacctgagcttcaaggctctactgatagcgaacattgtggcctcactctcactctgcgaatcgaaataaacatagagggaatcggttcaatggttcctgagagagtcgtattctttttgaagacgacggaatgtttgcggcaattttttccgtgtgtggaattcttcttgactgcacaactccagggttccgcgtcccgaccatgcagttgcctcgaatatacagagagaggaggagagggaggaggaaacgacacagcttagcggttggaagaacaattcatccaggttccgggcgctaactcgcggatccggctaagtgaatgttgctgaactgctgtgagggcgaacgagcaaataagtgggaacgaaaacgagtggaagagaaactacagtaaattatgtacatattcacgatctcggagccagtggagcggaagaaggaagtgagcaagccttacgattcggacccaacaaccgtgctcgcgaaaaattcttccctgtatctctaacacgttgcgccagaagcttcttccagctccctgatctcatttttcatgctcgtgccgagttgacgttttcttgccgaaattccccccatttctatccgggaatgagagcagcttgagctcgtcgtccccattttgtatgtttttcgctttcagcgctctctcacgctgcagcagtctgtctatagatcctcgagtgtggtcttcgtcggagcgagtccggagcttactcggtacactggaccgagcctgtccaactatacatcacgggagaaatattcctgttggaaacgtttttcctatgtatcacaacgcttgcctgacttctatctcagcttgaatgcatagtcctcatctgaagccgcagaggcacggatcccatgcaaatggcgaagatgtcatcccatctcctctgcagccatgctgtgagagactccagtgagagaattcgaaccgagaatagtcagcattgcggcggttccgttctagcgcacaaggctgccttgtcgcaatcggagcggcaaggtcgttcaagctcctgaggtgaacaggagaatcgcatccgaaatcatatcctgtgcattccggacagttcgtgatttcgcaagcgggcggttcagcctgcttgcgaaagcctgcagcctgctgcactaccgcttgttttgcgtgaaaacgttgagtattggctctgctccactcggtgaggtgagttgcggaccactcatgatttatcttttaatctcgagaagccgacgtcaggagaaagtcattgaaatcttattcggcggcccccaagctttcagctctccgctttgcctgagcactacttaaggttttcgggcgcgctattccaatgtgggcagagagtgtgaaatttccaaccgaaattctgggatctcgagcatgagatcaacagctccccgttgtttgatcatcgatctcatgtacagccagctaagcttcgtagttcagatggcctcgagatttaatttatccctagtcatcaatttgcttcaattttttacgatatgaattcacgtttcaagacactgagacttagtagaaatccacagcacagcgtctggcccgccgatcgtgtccaatttatcctatcagatgccgaaattcgcccaattttcgtgttacaaatgacagattgaacaacctggaaaaagaatgaggggcggtccgagagtagctcacatacggccactaccgcatgtgaccacttttctgcaccgtcgattgtactgcgcctctcgtcgacccaggaaaacggttattcatgctaatttctgagctttacgagggccccacatgttggtcccggactcaatctcaaattgctcgagtgaatgccgaaattgaatgggggcatctcccgtgaattcgaaaaaatcgaagctttcttggttcatcgcgagcgaagtttgaggacaaactggagccagagagcacgatgttttcacgtcagaatgcggccttagctttccgaaatccgtgtgaatctgcgagagggaggcgtcaaggaaaagttgaggattggcgcatcggaaaatcagagcgatgatgacaagaggaggaaggggaggagtagggttggaactggaatgcatcaggcccgcgtgaaaaaaagctttcggaggtcgggtgagaagatgaggtgtttccgttcccggactatcaggaacgccgacagcgtttcgcggagattgaaatgtttcccaagattggaaaagccaagggaatattcactcctgaatggcaggggctggaggagaatccgttgagatagtcgccaagcataatttggagaatcggacagagaggaatgaagtgctgcggcagacttctgcatccgcagcgattcgtctcaatcctgccacgagctccttctcgtccaacgctcagctctgtcaacccccggtttctagcgaacatgagacctctccgagatctgttttgttgtgctcgccaagtcccgatctacgtccatagcgcccgaatacctggtttcccgggtcggatttctgacgaagttctttgtgtcttgagatcctaagcagacggggggcagaaagcggttcgaggtcccctagctctaccaggctggtagcggactctgtgactttgaggatgtctgttgcgatgaatgctctttagaactgtgtgccgatcgtctattcttgtccccacactcgcggaggcgtgtcgaggaactccatcaaaactattcctgttctcgaggagaaaaacggttaaggaatcatgcgagtcggtcaagcgagccccgccacgagccgcttgaagatgaaaacaaatggaggatcgcgtactccgcaccaagaaatcccctcaacgtcgagaggagtcagccggggccggatgaaaaagttgttgatgtatccgtctcctccgcgttcagcgaagcaaccacgatgaaccaaagaatgagtcgttgaaagttcttttcatagagatggaacaattcattaattgcatagttctaggtacgaacgcacgaaatgcgcacgtcggctcgatgggggtcaacaccctttcccctgttgtttctgtcgtgctcactcattgccgttccttgcaggtgtaacggagcggggcgagctagggaacatagttccaggaatgggagcgcgtgggagacatccccagagcgaatggcaacgtctagcaaagctggtgtctacgccggccagtgggagactgtcccggaaacagtcaacacgcaacaggcacgccgcgcaaaatgtcgtcgtttggttccacagcatggataagaggtactcgtgcttcccgaattggtgctgatgagagatattttgtctgccgtatcaactgattttcaacaaattccatctcctctgtttgaagggcatgcccgtgtattttttcaccctactgtgagatgatcgttgatcggaggttgcccgaccctcagagagtgcccctatgctatggttctgatggtgaataggtcacagaactcgatcgaatgggggcgacgctggcggagctcgcagacaagagccatgtgcctttgggtacgagtcaccagtgagctgcaagagtcactggcacggacaaacagtagttccaccattcaaatcccgagcgaataatcaaaaggagattcacaatcggattcgtggttcagcattgcaagtcggtgctcatcccccatcatatgaaatgtttatgtatgcgtagttcgttcacatcagagggcctgcaagtggaggaactccagcttggatgaatagcttcccggacggcgaaatgctttcaacgatccggaaagtcaaagcgtaacctggatgactattccggcgaagttccctctgcgtgcgaacaatcacggagtcctttccgctgctttgcgagatgagctccatgcgataacgcacggattctcaaactgggtgtaataacccctggggttccgggaggtgtcaccatacctcctacaacgcggaacgggagggaggggctccgactacggaatctgaatcggaaaccatcttaccacggaggatgcactacaacgctggtgacacagccgaggaagtttcggagccgctgcgatgacgcaagatgtcttaaacctgtcgccgttccgcaggttcgtcgacatgagagccctgtgtcaaacggagagagtggccagctccgtcagttgcgacaacggtgaccgctcgaactttcggctgtcctggaattccttccctcatttcctcggggatcgatctcgcttcattatgccctattcgtcgtctttatgtatggagctattgagtttaacgacactcctccttcacaatgccttcggcggacgtcgattcttcaatcgcctactgagagggacttgaaacgtctgccgaccggactcatggtcccgtcggaaaaagccgaggaaaccggtgcagatgatctcctgactgttagttccctgatctctcaatcagaaaaaaggaacattttcatagagaaggcaggcaaggcggagaactcaaaaatttcctgcagcgctcaaagaaaggagccagaagtatgctcaaagtatccaggtgctcaacatattctgaattctatacggaatgagagtttccgcggtacggtggaggagccaagctcgagtgagataaccagaaccactgttctccagatagggatacccggagccttgggatctacaaggaataggtcgaacgaatcagagataagtctctcaacgaaaaactccgagatttcagaggaattggcagtcgagaaaagaggagaggggtttctccggaaccatggaaacggagaatcttcgctggggaattccttttgatgtttgcgataccgcctcgggtggattaatttttcctccccggaaaagatcggaccgggacatatcatgggatttcgggaactgattttgaactcgactgagggacgtttctaggttctcgtctgagagacgtctcacagctcgcagttcgcagtcgctcgtacagtcttgagatgcgcggttaagagctggcagccaaaggcgtgggaaggcattctcaacgtcgaaagtggaagaagttgttgagaatcatcggaacgatggcttcgccgcgtcgcgggggggatagaccctgtgtgcttccccaactcggatagcgtgttggacgagaatgtccctgtctgtcgacgaaatctccctgtctgtcgacgaaatctcctacgatataaacgatccattttcagatgcaccgaccgcacagaggatgacctggaaatgatctacgctaagctgcgaagtatgcctccgttctcacaactgcacccagtactcctgcagcagctcgcatactacggctactacgaggatatagatgccggcgttacgcgtacgtccattgcagttttgtctttccgatcctccaagagcttcattcggataaaataccagtcgaattccccagcgttctgagtggtggagcagtgcgcttcgcatggcgaaattcagcgataaggtggagcaatctgtacagttttcgctgagcctgcagaaattttccggagttcgctcttggacctccaccgaatcccgttgcgacaaggcagcaactttcctcgatcggagcgactgctagcgtcctgaactcttctccggtagaatgtctggctttcatttcagcaacacgagcgcgacataagtgcgccgaccaacggcatacgtctcttcgctcgccaattgaggagtcgcgacgtaggtttccagctcgaggattccctgtttttaggctcctgctccggcaacgcctctcactacactcatttgactgttgtgtcgagtgttcggcgacttcaatacaagcccgatttcccgacgactcaacaggaactccatcggagtcattgaattctgaagttctaatccgagtcacgtctcagttttcagagaaggcgataaggggaagaactggtatgccgtactcaagggctcactcgatgtccaaatcgcgaacccttcgggagtgtcgaacgtaagttcatcgagccatcaaatctatagcgatcctgtcacgtacgctagatgacaaggatcaaccgtgattgatccacgccaaattctcagagaagagaacagcttgttctcgccgaattctattgacgcggagcgttgaatgtttccaagccctcaggcggcgaacatttcaaaacgtggacgttgcggtgacgtgtttatgaaaacgcgagactcgaagtctgcgctgtacgaagtattgttgaaggtcataattcctctcgggactccatcaggaaccaaacactgcaactgacgtcgtccgcctccggcactggacccgatgacgtacgtgactgtggcattacgagtttcgacacaggcgcgccaatctgtttctacgctcggcaacacctcgatgctctgtagcagtctttcaatgagtgcgtattccaagcattgaggcatccggggtgcaacgtgcacagacagctcgcgtcgacatgggcggattcccgaaagcgggaaggtctcccgtgttcctcgattggttatctttaatccaggtatggaagtcagagagaatcagagcacgaggggacggacattaagctcaaggagggcgaccccactttcctcgatcccgaagggcgagggtgtggatcgatgatgacgttggttcacatgaagccctctgggtcgggcgaaagcagttaatcatctctgtcttgcttactccactgttgattgtggaactgcggcaagttctcagagcacgcgactcatatagagatgggagctaggagttgcctggtgtggtcaccacttgctccacgaaacgaacaattgaggcccccggagacacgagtcgtgttacaagaaggaactccgagcatccggcgctcgggagaggccggaacacttctcaacatctgaggcggggtcgttagagtgattcccactgtcatgttgcctagcattctcttcgagggaccaacatcactctgccctgtttttgttcggacgaatgtttgctctggaaacttccctgttgctatgagctatccctcgaactgatttcgatttctcttgcgacgctcgcacaagaagcggccgctgcgaggaatgggacgaaatgtcacacgtgcggataacgtgtgcatacgatcggatcctagctctccgcggaattctaaagagcagatgttcataacgtttgtagcgatttctgctgcttttgcccaggtcggagaagggagggtcagcgatgatcgagatgttgcaccgttcctttaatcaagctgattgcaattggtttgattatcgtctgcatcgatcgccctccatatcttcctctgaggctctcatcgctcactgagaacgggtcgttcgttcaccatcgttcaatgcttttccaggccagtacaggtagttcttgccaggcctcccatcccgagctttgtgcggacgcccacgtcatcgatatatcgatgggaagtagaacgtcaggtgcactgcaaggaaaggtggaagaagggagagagtaagaatagcgcaatgcaaggagttccgcaaagaaacgcggagatgcagaaactggtgcatcgtgaggcccagttgggacggagcagcctttcctcgccgcagatcggagccaactcttgatgattctgcaggcgctctcggcagaattgcactgatcttcgtgttcggcgtcggtgattattaccacgaaagacggccccgctgggctgccgcttgcgcaatggtctgtgacgacaaagcccacgttgttgccgctgttgctggtagccctccattccagaaacactttccctggatctcggacgatctactaacgcaggcgaacgatggacactcggagagtcagatagacgacatatctacactcgatgggttgaactatctgttgtcagggatgactcagcacaacgacgagagaccgcttcagggactgaaaccgggtctatatgagcagcacgagaggacgaagtgagtgacgttcggccctctggctctcgatcctgggaacctgctatctatcggatctgcacctcggaccaaggtttccgcgtaaactcactggaagtcatggaagcccacgtcaacggagggaacggcagataaaagataatagagaccggagctttcgaataactctcctcgatcacgtttgccattcaagtgaagagagcgttttcgcaatttgaatatctgctatcgagttgaaatcacgctgcggcaatcccgtttgtgtgtattgaatgctgtttatttttccgaggagcactacatactacatctctaggcttgttacgtctcctccctgcaagaacgatcgataggatgagattctgattcaggaggggagcctccagaatcctgatcagtggttctatccgcggtccaatcgtgatatatatcgctgtcgcgctttctcccacagaatttcaagtataagtgcaacgacgcaagcactcagagctatcccatgcgacacaaacgggaattctagatcactgatagtcagcgcctctgttgtttcggctcgttgattccctttactgggcacgcactcgaaatggcctggagcacgttccataggacgaacaaagggtactttttgcgcggcgatttggtggattttcgatctgactttcaagcggatgctcgggtccacgtgctttcctgcgaaagaaatctccgatggatttcaggaggatcggcgatgagcgaactcaccagccagttatacaatatatcggatcaaaactgaaggtctgattggttggaacggctcacccataacgattaaggccggcctcggcgtgaagttctcgaatcccatgtagtagaagtagggcgtggttttgcaccacaaactggtttgatacattattgatacgtcttccatgatgataaccagcctactttccgtcaattcggagacgatatcatcgtggtaaatatctttcgggttcctcgctctgcctctggtcctaagagctgaacggagcctgtcgaaacaatcggaactggtctcaactctaacggcgagccgtctccgttggaaaaacactctaggcgccacgaacgctcagctcaacttcaactccgtccatttgcagctaaggatctagccgaataagaggagttgtgtgcaccagcccaatgtaactttccacaatccggcctcccttaaggtttgagctttccccgtcttcacaatcctcgtcgaaccactattatccatttgaggccctgtatctgggaacgaactcgtgattgtcgtatctcgaagaacacgggcgcacagagtcaaacgataacattctggtgagctgtttccaggggctgaagtttcgggcagtagtcatgggatcgaacaattgacaagacattagaaatcggaagttcctcaattccatggcttgcatacgtctcgtgtccggccaaggaccggtgaattccgaaatacagccccgtgtaatcctttgcttccgcgaagtttcatgctgatcgagacttcgccttcgcggtgtcgactctgagaaggtccccgatcagatcccttcatgataacattggaagaactgagaaaaccgctaggcccaaactggacgaatttctctctatcttcatcctttccaacgaggaatgttcctccactttggatagtttgaagtgcacgggatcttcgataaggaatcatcaatcaccaagattgctttgttctggttttagcacaccctccgaaggaagaaaaagaatccagagttacctgatacctgagcacagtaaggcagtacacggcggcagcctcgtgagcaccgcatcctacgatgcggcttcttccttgtatccacccaatatttgcttgactagcgcgatctccgagggatttcaggtgactggcaccgtcgaatgctgtgctcacatgttacgtgtactgcctagattttgctgatctcggcttccgatgcggtggatgaagattggtcagggaaaaatgatgatgggaatcatgatggaagaaacagcttccgcctatgactcggcgatctcctgagtctttcggatgtttccaacgggttcaggttaagcacccggactcgatcatgagggagcggtccggtcgggatcctattcggagacctactccggaggctgagtatcgataacgatgagactcaacgagtggaaatgaagtacctcgggctgtcttatggagctcattgacactttttcggtcgcagggagttaattgaacattcgatatgcgaaacgtccgctttttgatgccttggaaatgatgcgatgttatcatagatgtatgatagactggcccccgaaaagaactctccaaaaagttgtctttggcgttctgaatccattggctctctagttatacggattccaagtttgctgtcgaatacagctgtcataatgaagcatcatggaagtgtggatctagatggcggagagagctggaatctcaattgaaacgtttttttttttctcacattcggaacatgctccgccggattcgggtaatattcgttgagatggggcacttgaaccaagagacctttccacggcaaacagcagatactttaagttcgagagcgagttcctcctcaaatcgcaagtttccactcacttgactcccaactctccaggggtcgtttctagaatcgtatgaataggggactggacaggatatgcgatctgcaaccacgggctctgcacgatatcgcgaagcgaactgatccgcatcgtcggggcctttaccaccatgtttgctttcaagtcctgagtgaacagctgcatcaggatgaagctcccgacaatccaaattccaccttaaattgaaaatggcattgtggagatttcacctagggagaggacacggcgaggtgtccgatgtgtcaggacgccggggaaagttgagctctagctcgaatctttagcctaatctggggtttcttgttatgcagtaggaatcgatctctcgattggatggttctcgggtggtgaatactgaccgtttattcgggcgaaatggtatgtgaatctatctttggttgattcctggagaagagtttgacacatggcgaacaaatccgcagacgaactccagaacgtgagctgggctcccctgaccaatcgttcaatcgttatcagcgccgaaagacaaatgatcgatgaggcgatgaaaatccaggtcacgggttcgaaagctctagtgtatggcgtaggcttggtctcgaatgcttttctcatcccggtcagcgccgttatggaggtgtgctcgctgctcggcatcatgtcgaactgcatgaatacatcgtagtcagaggtgaacggcccgaccgctagatccgcttcctgacgctggagggcaccgagcatccctgaccaggtattgttctcgaacagatgaccgtagagaccgtccgatgggatccatgcaacgtaagtgtggttaacagaggcggtgatgttgtccaccatagctccgattatcccctctagtttaatgctgccgtctgggaggaccgcttgcatgacccatggtttgaactggaaaaaagtggcgttgagtcatgttatacgtttggttccgccatatgatgattcgggacgatttgcttgaaccgatactcggaaactttcatccaaggtttcgctgttggtggtggtgacttcctttgttgagatcgaaatcaaaacgagtgaaacggaagaaggaatcgaggcttcgacgcgggaggtggagagaccagagtctcgaaggcaagtccaattgagattcgaagagtgaaagaacgcgcgagagcagacaggtcgaccagtctgtgagctcagggcattcctcctcccaacgttctcgactcagaatcgaactatcgcctctcgcttggcgcgcatcggccggatgaatttcgaggaagaagtgggtgaggacctcttttcgctcatggcggaggttggagtgactcaacgaactatccgccgctttcggacatcatccaccgatgcagtgggctcgggaaaatttcaaactttctgtatctgctgaatagcgctggaaagctgttctactggaaacttcgcttcgagactgcatgtccattgggcggagacgagctcccgcatccttcggggaatatcgtgatggagtcaacgttcatacacagccttaccgtttaccctcgagttcaaataaagagactgcgcacttcgagctcctggctggttcttgtgacctcctaggaacttcgaagtgatcgacaaggatgcagaatttcgcctgctgtgtttaatgtcgcttgcattccgaacgccaaacgatcctgtcgtccggacacctgaacatggttttgattcgcggattgtcccgaggaatagtggaacgggaagccagcctaagggcaactccgccatactgagccgatagatatccaagccacacgtgttccgctcgtgttatcaaactcattacagaccttcattgtcaatgaagatggagcgaggccattggtctgaatcccagcgattgctagttcggatctggggagattccccgggtctttgagacaacctaaccgcgttgtggccgacacagggagcaactgttgcggaatcttccaaggtctctccagcaacagcaacttcgtagtttgaaaaaacgctgagtcactcacgaggttgtaaacgaggcgaagctgcttcgacatcgggatgacagctcagcggggctcgtgcggagcttgtggcgtgaggtgaccgcatgcaagcgaagttctcgtcttctgatcgaattaaaaaaaaaagatccagttcctaatcaatttcaagtttcgattgagttaattttcaagccgaccttggccgagctctgccagtcaatcatcgcgccgttcggaactgataacgtcggacgctcactcaagcactcaaggcaatccattctcttgatgtgtttgtcagcgattcggaagcatttaattgattcttcgaatcatttggagcttttgcttcctggttcgaattctccactttgggggcgacatggcacaaaaatcctctgaatcgatgaaggtgcagataatatccagagaaccgctctatttgcttaaaaggaagcaaatgtcacctcaatgttgctcgagggaccgtgtcggactttgcacatactcatggatcgatgaacgatgggcatgggtcataactgacactatcctcctcggcttggagctgtttattccccactcttatcgcgaaactagtcctaatcccaaatcctggctcaaccagcaatgctcttcagctgttcggaacgagaactcggcacgccaaacttataagcctgagcttggtgcttgcaaaattcaaatcgaggactcgaaaaattcccattcatactccatttactaaagactcacctcgtgtcccagtggcagccacccctcctggtcactgacgaaagctgtcccccaaaaatttccaacaagtgcatttccacccatctccaagcctgatggttttctcgcagcaaacaccgaagataaggccaatgccctcgttggagtccttgcgaaaaattattatctcgataccggcaatcgccacctccccgcgtaccaccttccatggtacgcgttccgatctcgttccgccagtcctaaatacgcgaaattctcagttcccttgatgttcctaggtcccaaaggtgtgcctgcaatagtttccaaagagagcgcccctgaactgactactatcctctgtgaactcttctgtctcgccttcgatctcagcatatttccagattccttcctccggatctcaaatggcataaacttatcgcaaccttggctgagtcagcttcgcaaaagctaaatcttcttccgggccgagcgctatttccccctcacaccttctgttgctaaataggccccaatcacgtccctctctcgagttctgcttccatgtttgggggagcaccgctctcatatcccttctcatcctcgattctacacaaaagcgtgctgctcgtctcatcggggaccctgtcctcattccttggatccttgtcctcccgacgcaagtataccgacctctgtctatctcatcgatacctccatgaaagatgttcagatgaaatcccttccctcggtcctccctcaccggtctgcgttcgtggaacaagagtacttccgagcaacttcccaattctgttctactgtccacccatcattcagttcagtctgactctcacttctcccctccaacgtacaattccgaactcttaggaacttctatcctctcgcatcttccggataactagcctcatgttctttccgggggtattacccatttgagcccaacgctcgagctgaatctcccgttcttctgggtcgggggtagctgcatctttttcctatggctcctctacatatgtctccttcgttgtcagtctccgtgcttttcgtactctcagtcccttccgtgaatattagggtctaccattgtgagttttgatcgagaaaaactatctaccgatccgtgtgatgcagtgaccacaggacgcgtcgtacttcagttatggagcaaaatgaacccggaatcggactatttttcaccgggacacgacgaaaacgtggacgatgagaagaatgcccgaccctaactgattgccctatagttcgtatcgatgcttccatgtgctattgacgtgaatcgctcaacgtctgtccgtcgctccgggaagcctcaagtcaggccgtcggcgctcttgctgagtacactgagtgctgtctattcgaaaacttcctcaaactcgggtaaacatcggtgctgggtgtgaacccaaaagactgcgttcttttgagcagcgccaataaccatgccggatactgtttgcaaccgggagggccaggagatttctgcgctcaactttaaggctgagccgatttcggagagctccgctaaattggctgggctttcccccgcgcagttcgcacctcggaaggtgaaatcttcagacatcaaattatttttaaccgcggaatcttccatccgcgggtccccaggaaagggagacagcgtttcgccgtggaatccgagctcgcattattcggatgggttactcaactcgcattgtagcaatcgattggtacttcatttccatgatcgccccgagagctgaaggggagtgcctatcgatcgttgtccaccctcccgatccgtgtcgcgctcccatgaatacttagatcgacatcgctgtcgacgctcaaacgttctcagcgctcagataagtcagagtcgtaagagagttcacggaaactcagatatctctgggatgtttggaaatcgcagaaaccgttctctccatcagaaagctgattgggagagtctggcgggcgttttggaagaagaatgtcgccgagagaggcgaagagagtgttcttctgagcccgtggagttaggcgaatttcgacggaatgtcaatgtttgtgtcggctgtttagctgaacctcagaaccgattcatttctcgaaaggagaggaaatgagtgagtcgtcaacgttgtggagataccgctgtcgagcagagattttttccgacatcaccgttttgctcggacacgttgacgatcaaattatatcggcccgacacaacttcgtctccggccgctcggaatcgattggggattgagaggattcggatgattcctgattgtcgacgctgcagccctctgaagaactcgatacatgcaacttttacgatcgggtttgacaacgacatgcttcttgaatctcactgactgctcatctgaatcctctgttcaccgcggaactcccgagaacaattcatgaacgctcacacggacagtttcgaatgtcagatttggctttggagaatatttcctagcgtataactgctggagcccgcactgattctttgaaaaccttcccggcagcccagcctctgatctctcgagaatttcccctctcggaggtttgtttatctaaaagtcgatcgctccaatctggggaatacttccaggagagtgcggctggatgctcaaagttcgctggattcgcagtcgcgaggagttcgtagaaaaccggcgtgcttagtttgagctctgattgcttccgcgggacagaatactattctgagcctgaggatttccgcccgatttgcatccaatacttccgcgctaactgggctcccggaccggagtgcctcgaacgaaaactcattcctccatgttgctgccgcgggaatccgaaccgtgtgcgacaaaactcggaactgcctgggagagcctcctccttgatctcgggagccgtgaattgattccgttccagagttggtcttcctgatcccactttcgtgaaagtttcgagatgacgcgtgaaatgagtcgtacaatcatgatcatatcgtgtacttgtattccttgagagcgatggagttattggctgttgggggcttgtttgtcgacgacgttgaatgactgcagattcaccctgaataagcaatgtctcgagacaagcgctgtttccgcacgttatccgaatgtggtgttctcaatcagagccgttgtgcgggttggatgcgacttcatctcggctgaatgatagcccaagctgggagcacattattgaccacgattccgtattcagtgcgatgtctagactggcggaaacaataggttgacacagggtgtgacggactcaccttgcgacctaattaagacagaaagggtccgtgttgcgtttcctgaccgagctcctcaggatatccggggatttttccatgctgcgactcctgtcgatactgccttttccgaatgatcctgcgcgcgacgggcgcaacgaatagtttcctagatgtggagctgtttcggatcctgggagcattcgaacgcgccgtttgaactgacttgagatgagtaatcatttgctacggacatggataataatgagatgactttcttctcctttccaggacaacgtgacgctgtgtacgctaggagtaggccgagccttcggcgagtccatttcagggctttcgctcccacattcagcaacagttgtcacgaatgagtgttgtgaactgctgaggatcgaccagagagacttccagttgctctgggaggtaagttacaccggatccatgctctgatgcggagagcgatgcggaaaaccttccgatgaattcctttttcacttcctgccctgcgagtcattgaggcagtgagaacgggtattgtactctagggaggtattcggggaacacgccaaccagaagacccgggagtgcgtctattcacgtcgatctatcaaatcagtgcacttgaggtcaaccatttgttttccatgttcgttctcaacgatgctccgtatccgccatttctgcgcatgaggcacgcatcggtatccgatggtgtaatcggccgtctagactcgagacggccggttacgagcaggcgaacgtcatcgacgggattttctggctccaaggtttcagagaatcgacttaaattgatgcgggtctcaacgtaaagccgagtttgaacttacgagccatacggggccgtctcccttgtgaagttttgcgagcacttcgagcccgtctccgagagacgacgaccgaacctgcgagacactccgacccagacgatctcagccaatgaccaatgagattaaccgacggaactaagagatctaattctctccggagtcgactatgtctgcgagctctcattttgatcgccctcgaactggtcgcgagatgagaagagccattcttgcgttccggttcaagtatagtttgaatcacgcatcgtctgcaacattgactcagctgagagattcatccgggaatgggggatcaccctccacctaggttccgcgccgcgggggacgaaatcatctctggagacattaaaccgagtttcagtaacgaccatccgtcttcattctccatacttccgtcggaattcactgagaaaaatcacagcccatgtttcccggacgtactttcccattcgacgcgggagcttccgtccagaggagcagtcccagactcttttgtcagcctccgttcgaggctctcgacaagtggattgtccattctgctgagtgagtagttccaggcagccgccatgggattcggccgagctcattgcatcaagtccagaggctacaggtgtctgtgtcttgggggttcgcatgtggcagagaatccattatcgcggccagaatggaactgtcctcaagcgatcttggtgctttccgtgggcgggaagagggtctcagaagaggctcgagatcgctggaaacttctggagccctgagtccattcgacggggttcgcagtcagcattcattgttctcaatctgttcgtaacattcgtgttcatgtccagcgtatgacagccatgcgatcggcatctttttcgtagcaacgttctcggaaaaaccttcacttccaaggtctctgaacgagactaggaaacccagttctcagtgaagctcccctgagactggagttttccaatcttcaacgacggagggatcatcccccggtgtagtatcactcgtcgagcgtagacttcgattcattttcttttgtgcaagtccatcgatcgtcgcgacccttgcgaccgaagcggtgagatagcgctggtaaacaaagttccaagtccgaggaaactttctctctcgcagaacgccaccgacatatggcgcggggcgagaaaattatcgtcgtcggccgggtgacttgacttctcggctaagtggcagcttccttcgtagtctgaagttgctggtttgcctgatcacgtggtctcagagggaagtttgctccattagttcgttggcgatttacatatttggcaagaaaaagttcgcgcagcctttgcggagaacgaaacgggtggccgagttcgaactccggcgctcagtgaccgttccaagcgttccgagggtaacgtgaatcgactgagcgaggcgggcgcgctggattcggaacgactgttgtatctttcgacttctcgtatcattcgagagcgagagcaccgacaaggcaccagaagagctcaactgctctgcaattctcgggagcgcgttaattgcgcattgatggcaactcagtgtctcccataggccacttccgtcgggagcagaacgataagcttgccacaaactgacttgatctgattcagctcggacctcctctcctgatgatctagttcaggtgaaatttcgaggaaattaggccgcgcggtattcggctgggagcagtttcccttatttgtcccaaattatgcaggaacaaggttgattggaaagctgaccttgatcatcatggaggagcccgcacaccgcacactcaagctcacctagcagccattattgttgaacattcggaaagccgagcgagcgagcgagcaaacctggaaaccgtcggagactcgctccacgaaacaatcgatcacaacttgtcagtcggttccgaactcaaaacaggcaccgtgaacgtcgaggaatctctcagcagttccgtgatccgatcgacagcggaacattttgttgttgctgtatcgaaccaccgcgacgacagtgttctctccaagtcgccgaagagtgcgaacgggccaccctcgaggagtttcaccaagaacggatcgttgtggtgtcagtggttgcggcaggataccgggagccgtgtctgagctctgctacgttcccggctcacccatgcgacaatgtttccatcggtcgacgtttcgctggaaccggagacagactccgtgtgatcggctggagaggagtttccacaacctttccgagagcggctccctcagctcggcgcaacccagaagggaacctggagtatatgcgagacgtagcctgccgaaacgcgatcagcgagattcccgcggagccggctcgtttcgaagctcggctatcggggtcactggccgatttctactctccatccgtgtctcaaagccttgatccaacacctgcgattgtgtctctatccgttcgattcggcatcgagccggttgcccaaggtttccaggctctcgtctggccatcagtccggcgttggattagtgacctggcgaacgtacaaacgccctctccctggccgcttcctcgaaaataagtccactcaattccgaccctatggaaaatgacttttacattctgtgagtggaaatcgtcgctgagctctgtttgtgaagggtgaacggaactttcaggccgggaacgtctgatagccaatcggacgagatccccgacagtggaacgactgaaactcttcgagagaccgaaagaacggtgcgacaccagaatggtggagtgcgagtgtataccgcatcaggaggacgcagtatgggatgtttcggtacgtaagaggtcttgacgaaatgggaacgtggaatgacgtcgtatgaggattccctgttttcaaagatgtccgattgacaaaacctttgggtattatgtgaaaaaaggaaggaaccgctagggataacggcctcatgctttaaaacttggtcgataggtgatctcaagaagtgaaaaacccgtctcccatgctaattcagagaagttgagtttattctcgttaataggctgggctatagttcccaacatgcgcacgaataatctgttgagggctcaggaagccgttgcgaactccgctcaacggaaagtctctggaggatacgagcagaccggcgaactctcaacttcgaaaacgttcccagacaatgcttgcaagttctccttggatgtgacggatgtgcgatttgagactcgcgaataattcaattttcgctctcagctaatctccaagaggtgtgacgtaattgtatcaaaatagtgcgcctcattggccgccgcactagttcgtggatggagcctaatgcagtttcgagaataatttccctccagttcctgaggtggggcagggggaacgatttaaacgttggagacttgatcgtgcgttgttcctctgagtgagaaccaaaaacggcccgtaaccctgaaagtgaagatggaacagctgatgattttggcggctgttgatgtgagatcacaagaaaatcatagctgtggagctctcattgtttcgaggagaaatcgacgagaaaccgttgaaaggaccggtctagcacgcgcaacccaaatgaagcgtgtcacgggcaaggtcgaattacgcgtggagtagttgtcgaatcgagaagctcgggttcgtaatccgtcgcaacgggtcctgttcagtctcactaataaggcccgacatggaaaggctctgtgagagtcttcgaagggcgaaagcagaagactcattgtcggcctgggggattcgttgctacaggaagggatccctctttctttcgctaataggatatcgccaccatcgagcagccatctgcaggcccgctgaagtgcacggggacattcttcccgagcgaacgaagtgttccgttgcggaacaataacactcgctacgggggaggagagcggggagaggaggagggagcgtccgacaaccccgaggtgaggtccggctccgagctggcggactcgttgatcgcgagccgggtgttctattccaaatgaaaaaggcttcattatcgtctcatgaaagcgccgtgccctcacataaggcccattggaggcccacttctcgttcctcgcttctcagggagttctcggagcgactgatgccatgcaatcaatggaacagggatcgtattgggatcgtcccaacatagctccaattcacgaatcgtgaacagtgggcttgatagtggtttccgacagttccccgatactagtttcccttggacacgccgagcgaccgggaaaccggaatagcacaaccagttcggaagccgacgaaggatcagcgaagtcagttctcaccttctgaacagagttcagcggaagcccccgacgttccacccgacgacactctcgtctccaacgctcggaatggggattccctttcagggccgtaaatcttctcaaatcccgcagcttggggtggctcctgatcagaatagagaatccaatcgagacgagcataggattcaatcatccaatcccctgcgaggaacgcgtgaagtttcacgcaaccttgggacagtcgaagatcaaatctggggatttcgcagctgagtccggaggatatcttcccggtgagagaaagtttcgcatccaagtaacacacgaggctccccagaaagttcgatggccagccgagtttcaacgccaaacaagagaaggaaacagacttcgtttggaaactccctcatgcggtggtccgatctcaggaatccagtagattctgacgacactagtcattgttttccatggttcatgtccgcatgatgcgcccatggtcaggaatattcgttgtccgtcatgaatcagcttcattcgtgacgcgtgcgctgtacacgatgagcagataggcgaaacgaatattcctctcccttcctaagcacaagctccgaggttttgtctctcgttgctgtccgtctttcaagccagcgtgacttcgggatattattcgccgcagtttcggaagacccctagggacacgattctgttcgtagcgggtgagcactaatctcggaaaactcggtagctacggagcgtctccggagaactctcctcgattctatgtgaatcttggtgtgttttcagttgttggaatggtcgtattgagatgatattggtgttcattcgatcctgggaatctcttcacgagatgcgggattttccacgatcctgttcgtgccgcgcattcgacggaatccaattccgaggaaaagatcaaaactaatcctctagtatcacctcggcggacctgcgctacacggcggctcaaggagtaaagatacgtcggaagttctgaattcagactcggaaagatgaggatgaaatcgcacatggatcccgaaggccgaaaatttcgggcaaatgccggccctgtttctgcgtcgggagagaagaatcatcgaaactaggttcctctcccgagagcccgtggacgtatggttccaatagcgggagtgttcatagacgcaggataccaggcttccacgcggtgcgatactttggggtgttaaatggagctgaaatttcggatccttggtgctcgtttctggttctgtcctcgcgatcttccttccttgagcctcctggcttgcgacgtcatcttcccatcatcgaggctttttctcgagcatacaaataaggctttgagtgccccgagctctcgtttcgcttgttcttgaccatgtctcgcgacgaacttgactggaccctcttgaaggctggggtaaaaggggtaaacagcaaaaccactcttggtcgtcatgaggtcctcaagttgtcgtcccgaggaggacgctggaaggatgcagttcccgcaactcattctttgttactcctccgtcgccctcttcactttgtgattggaggacggcagaaagaatgtgtcgaacaccgctgctcgtattcaacgtcgactctcatgaagaccaccgtgcgaggtttaagtctggagcgcggagctccacgactcggaaattcatttgagaaatccgagcatattagtttctcatgcaaatgtgctcgcgctctctggaaaggaagctctctggaaacataaagctgtggcgtcccagctgacgcgagattaatttgtgattctctgattatccgagaattctctttgttctccgccacattccaccaagcgatctgggtttcggaggagtcctttgagccctccatgtggcctgccgagctcgatcgaaaccacgacgcgtcgagtggagctcttccgggcgcgaggccagatcgcagcctcggtcatgaagaggagcgaggctcgtatcgcgatctgctctctcttctggtcatcgattccgttcgggaaagatgaagtcttcctgtcgcacctctggtcgaataaaagttgagcgatgggactcaaaccatctcgtcggctgtctcggtgtgtcccgcgcggcctttgtcgtcatccgggtcgacgttggatttctgcatgaacgagacagccagctcgttagttcagccgtcgtctgcgttaacaagcttaagactcccgtaattgctccgggaaagtgtgccactccgacgatgagtctacgagcggcgaccaaatgaatattcgaagctccatggcgaacagagcagctccctcacgacaacgaactctgatattccatgacgaaccccgtgttgggatcgcccaggtgtgttcaggatctcgcaaatcggttcaagggctcggatcccgcccgagggcggacggggagcggctgagagatagtacggaaacgctgcaatgaagctccggaaagccaacacgagaggagcacgatcgttctgcccatcggctactgttcgtctggagcagcggtcttgagtttattttcagaggtctcgaggtcgttacggtctgcttttttctgttgctgaactacggcgacgttggtgcagagtttcattctcacccgtttgggcgagcgtcggacacgtgcgacaaacggctgtcggtcgtcgttgcggcagactgacttcgagcggcgacggatcgctccgacgtcaagctctgatgtgaacggagtgcgagctagctgcaagcgggctagcgcttcaacgaccgtgtcggtgtttgtgagtgtcagtcagtgaggtgcccacgcagggggactcttctcggaggcccggtagtggatttttttctcgatcgccccctgatcacccttcgggacctggcccggccggggcccgctcaaggttcaaacactggcgcgtcccgctctgggtcgaatggttcacacggaatcgagtactttttctgtcgaactcctggtcaggatgatgaacgaggagagaatgcgccatggattcgctcgcggaaagctgctccgatttccaatcatagaccatttcgcagagtctggaaattgcagcggcggtcgagagccacttgccactctcttatcgtttcctccctgagtcgatatccgtgatcgggtcgcttgtgattccatctgaccggactgcatccggagggcatccggagggagccattcccagtcgagaacggatttgcgagcagaagaaaattgagatgttcatgaaagctgtcgcaacttggctaactcggaactctttgagcaagagccatgcgaatgcggataggcctccgaaacttctgaaatctttgctgcgttgagctgcggggaggagagctcctacaagtcaatgagcaaacaatgcacccagagggtcacaaagagctccgcgtggggggcagctgcgaaatgcgaatgtcgggatgcaaaacgtttgacgcgtgtcggtcccttccttcgttccctctcgatgagactcgcgggactcgtctccccgacgaggcgaacccggctacgacgtggaacctttcgtcgcggatgagtgtccatccctcttgagttcctctcccagccggtagcgtccctggcgcccttgctgtttcttggtcaccactaccccagcttcacgcactctcctcggctgaatccccctccctccctcccggcgggaaacacaaactcggtctccgtatgcgtttccagactcttctgggaatatgtacagcccggagtaggtgagaagcttctcaacaatcagggcagcctgaaggactccgcgtgcgcaacgaactctttccgctcccagagtcgatgtggaacaagtcggagttttgttcctgtcgggaacattcgaaactgtcaccaccgctgaccacacgatattgttcacgatttactttccgctcgtacctagctatcggttcgaaaacctcgcgatcgcatcgtgtcagcccactatctctgacccgtctcgaaatcctgaccaatcatgtcctgcgtctaggggaacttcatgtccatgtcccgatcccccatgctccctcttgggtccactacgacggagcgcacatgcgtaccgtacgtcccgccgttccgacaacatcagacgggaaatcgacagcgtccggcaaaagccagcaacgtggttcccttcagcagtgaaatgtccacaatttcggcggtggccgggctcgtgatggtgctgctgctgcttccgctcggaaatagaaacactccgcattaggctcactcacaagggagccgctgtgttatcagctgtgttttcaaggctctctttcgactcactttctaaattcagctcacggtctcccgctacaggcggtcgagcaacactgcgcgcgagcgggcgctgcatcgagcgagtgaccccgcaggatgattttgttcgacgatccgcttcctcgctcgagtcttccgaccggtgtccaatcgaggccgtggaaccatgtgcccggaaggctcgggggcccagatttgagctccgtatcgttaggtccacatccattggttagattcgtggaaccgggagggatgattcctcgtcgagagcggagtccagataggcggaaacctcgagccggccgagcccgctcctctcaatctggcggaggtgttctcccgcaaaccaacgctgcgacggaaatcaaaccgggaggatcctatcccgaactgggagatcttcgtagccgcgcatgcattcgggagcttgtcgcggcaaccgagccgcacgtcatgcgaaatattgtacgcttttgatgaatttgttttccaacctttggagtcccgactctcttctgacacgacgccccgattcacagcgagaaaacattccccgaagtcggttctttggagcgaggacttcatttggggcgaatgcgggtcctgggagcacctgtgcaccgagcgctgggcctggttccgaaccgaatcatgaataagcatctcttctgctcaacatcctggaatcgaatactctccgagtcagatgagtgcggagcagagctctccgagatgttggcgtcgtcccactccttgaccttgagccattgaagcgcgaacgagttggcagtgccgctggccctcggcggcaggtctagaacggcgggagtaactcgattcacggagaacgaataattgagagtctcactctcactgccggcagccctgaatggccgctctccggggaaagcgccattctgtccgtcgcgaaaacccacgctcatctgaaaacatatcgaagagtattcctgtggctctctgagacaatcgatccgctgtcccaaggccctgatttggatacatcgtctgcgtacatatacccgactcgataatcgatcgatcgatatcagttacacaatcggacatctgcgtgacgcatgcgccgtccggtggtggaaacgagagctcatctcacctggcgacatccccgcaaaatactccttctcttgacgtgctcgaacatagaattccggacggctcccacatttccgagaagaggcggccctccccaagctgggtttgtgggcacacgcctctccgcccacctgtctgacttgtcgaataaatgcggtctttgaaagaaaataagtttcgaagctcggatggccggaggaaacgccggataactgtcagtaacgttccgagtgccagaccacactccctcccccgagagggggccgcaaacagcccgatgggatcgaaacgaacagggcgtaaccatcctcaagctcggagccagccagcacctcgtcagtcgagagtgcatcggctcagcgcgggtcaagtgcctccgaacgactgttcgtcttgggttgaaattgacggaaaccttttcgatgagagattttttccggcacggccgaacgctcagggatgggagccggacggtatggcgatccggcggctgacggcagcaatgttccgcactaagaaacgcaggggattgcggcgtgcgacaccgtccccaattccgagttattcaggcgcctcgagaataagaaaacacccccctgccgcgagaggtggagtcagcaacgagaaagctctcgtgccggccgagggaaaacgttccgctatcgttcgcaccagactcgcttcgcacttgttctcgccacaagtgactcgaaacagtcatcgcacggtccgaggagaaaacggcgagaaaatgggccattctgggaggttaactcacatgaacctggccgagagtcggggacctcacgtcctgcgatcatcgcgaaatcacggggagcgccatcagcacgatgatcggacgggaatgaatggacacacgcgcaaatagcaatcgatgcacctttgtttgagtccaaacagccatcgatgggcacgtggagcccggcgtcaacgacacgaaaattcacacctgtttgtctgggagctcgattgaatttcgaattcccaagcggctgcaacagaaggcgccacacttcgtgtctgtttcgctctctggcggactgatccctgcttttacgtcaggttagctcggtgtgtaaatgtgacggccggtgtgagtgtgtggtcgtaccgagacgctccagcgtcgctccattcgtttggttgctcgtcggctcagttcgaattgtcaacttagcattaaacccttaccaatatagagaggccctctaggaggcgcgagaaagaaacgttctgctccgtgagcactgagtgttggtgccgagcagatgatgccgagcagatcctctgctgcaaggcccagagtcctgagagcctgccgagctcgaatctcccgaaggggcgctctgatccggggtgccgtccgtcgagttttatttctccgtggatctctgtttcggagaagtgcgtgaaaaatgtgcgataaatttgtagagtctccatggatatctgagctcggttgcaaacttgcaagatcgtgcgccaggaagatgaagtggcggaacacgagaggtctctacgtcgtgtccaccggagaagaaggcttgagtgatttcaaggtaagcgacttcgagcttcggctactttctggcttccaccgattcttgttcgtccgtcacgatgcccagtcctgatgcccactgcccgccgccaagaaaccaaacagatttcagagcggtcggagcgcgggaactcggtctatccatggaatggaagaaagaatttgacatttcctcacagttaaagtcctgagagttgagacagggtgaaagctccgcccgttccaggaccaaaaccatcgctcaagccaaggcgacgtttcggctgacgcgagcctgccaaaattctttgaaattgttccacggcgcttctcagtcgggccgatgctgtcatcgtggttcgctgagttcagtttctggcaatcaggcgtttatagaacatttcgggctcgtccatgagaaacaccctcttcgtaagagggttagagacctcgataattattccacggaacgcaggcggcgatttccagtgcgggatcgggtctgttattacgtacgcgtgtatcgcccctggtcacgtcaggaaaaactgatggaaggggcgtcgaaggaagcgtgttccatggaaaggggaagaaggagcaaccgataactgaggtagacacacgacttcgggttgaacgcttccggttaatagagaatccagggctcttctcggcttggaccgggatcgcatcagagctcagatctgcgttccgagaaaaaccgcgccgtgatcagtttccgggtccccatagtgttggacgcttccacggaatcgtggtctcgtcgtgagactctggaaagcctcacaacagacttcacaagtgataataacgaaaattacaacgttcctcgcttatgcgaatatgggaacagggcgttaattttcctcgacgcagaacgaccaatttctcagagccacctcgtccggcccatattacgaacggcctccaaagtgtctgatcgacggagatacggtgcccgctcattatccacggtcgattgctcccaggacattccggaaataacgcatccttctctgattcgttctctcgcggaatccctctccccctttcccgcgttgaggttctggagagcacctgttagacccgtagctcatgctacgtgatcgatgcaccacaggcgcagttttcggtcgaaacgaaaaaaaaaacaagcataatagcgaatcacacgatcttggggatgagcaaggggcgaaagttttgagatgaatgtgggattagcgaccgcatcatttcaaacagagacgcggaagttcttttaagactttcactcagttttcacccgaggtgaggattttgcccgtgatgttctcatcagaggtgtctgtcattgatcggtgacccgtagctgtccccgagaactccgtgacaggcaatcccccctccatctgaccgtaccccatccggtggaatgcgatgtccacaccgagaagttcgcggagataggaggcacggaggcacatatccggttctccaacaattgtattcaccgattcggtctcacaccatccacatcatcccagtgatacgagcgagtcgctcgaatataaaaactctacccttttgccacgccttcagaactaatatctccatcttctctttttccaatactaaaacctcatatcgacacatccgtcgcctacaaacctgcggctgcggagcgccacccaggagcttctgcacacgaacaaaactcgcgaaatactgagcacagttccagcgatctgattaatttatccgaaaccagcgaagtcgcggggaacgagtgtattcgtgtcagatgtcgggctaggaatccccgtgatcccgagcggacaaaaaacaaccaggctcacgacggaggccagaaagagcgggtcaggcgaaactcgtggttgagactcttcacaatccatccgttcggatacgaaccgcggaaacagggcgcgcttgttcatcaacagaaatagatcccaggaagtgatatcggatcatggaatctgaaattcgctataatggcgctcgtctgtcgaatcgtttcgaagcaaatagagtggtcgctctccttggcttcgactcgaccagactgcgaatggtgttgctgttcgcgctgacgcccccccccccccctggctccacgcggccttttcctcgcacccggctaatgacaaacgatttcatcgaaggagaagctctctcccccctgctcgctcaccgaacctcgagctccgttcggcggaattttcatcgaagtactagagctgagtccacgccgatgcgagtttgaggtcgcgggcccgattccagcagccgtgttgtcgtagtgtggttcccatgacttccgacaggctctagaaacttcttgagaaacagggagctgtgcacccggacgcggaacacataagtgcaagctcaaagaagtcgtccaggactctccgaattattattttaatccgatgacgatcactcactcgagttggggggaagttccatcttgcagtctcgtcgcgagacgaatcaggaagctggatgagagaaaagccagaccatctgatgtaggtgggagttacgaggccgagccgatctctcatctgcgggagcgcctgttctcattaatggatacatcgaggtggggctgatggttacaaagatgaacaacgtcgatttatcttcgaggaaagttcgccacgatcgtggatattcaacatggaaaatatggcatggagtttccgtcccgtcgccgatgcgtttcgagtttcgcgacggaaacctcggatcgggttctcattcatcagggcgaaccaaattcacaaattccccatgcgacaatagttctcaagttgtcaattacctgacttcgtggatattttcctctcgaatgaaaatctcagcggcgaatttcgtcttagactttctctctcaaaaagcgcgactcccggtctctgcaagaccggtgtcattcatgcgatgcgggaaatgcagcaggagacgaaactcgctcgaagacttccatgagaatggaatctattttacgtcgcgctcgatccgggagagcacattgaaactcgagcacgctcagtaatgcctccccagaagcctaggacgcccgtgaggagcttttgaagttcaattcgaaagcagaaattggtgatttcatctctcaaattacaaataatttcctggatcacgtgggcaaaccccgttctgtgggcgctgggtttcgctccctcaggttctccgagatcggtcgactgtatcacccgaagttttggcagtgagggcaccttgattccgagtcacgcgatcgtcgaggaggaaccgtggaattattattgatcaggcttgcgatttttccctgtcatggccctctgcgtctccaatcatcgttgctttgcggcgtaatccccgatttctccgcgccggaatccggaagcggtcgagttttctgtcaaccggaatattctggaagtagccagccgcgtttccacggcagtcgctggtcttttacgactcccggccatcatgagcatgtgggaggcgacagaggaggagaggatcgcgatttggaagcgaatatctcctccgagcatgctaagaaaatcattacccgtagaccatcttcgagcttagtgtcagaaatgaagaccgatcgctccaagcacctgcaatcgtaactcggatgagaaactccctctcattccgaaaacgtggtcggaagggagaagctctccaactgttgacgcgaacgagccatcaaccgatcgtttccagagcgcttttccatatcgtaaatatccaacacacggaaaatggcttatcgacggctgactcagccgcgcctagaagaaggcgtctatcagcgattttcaagcgcgctcaaccgatcgttttcgatactttcaaagcatggtcacattgttcacatagcttatcgtgttggggtatttcaaatcggcgagatcaccgctataaatgccgccttgactgaccgcgggagaagagccggtccgaagtctcaggattatccaaaagaatctggaaccactctgggattgtctttcggggaacgaatcaccagaggccggggattccggtgtacttgtaccataatttcaaagcgaaagttctgtaataacgcgacaaaatgcaatcgatgctgtattcacgcatttctttcatggatatcattctcggtggttctgggcgcgaatttaatgcaaatcaagcgagtattccgagcttgtcgctccgtgggctttcgcagacttcgcataatatcgcgggccactttgcgtgagctggctgaagccgtctcgacgaaactttctgtgcggactccccccccccccccacggagagcgacggtagtcattttcttcgggctgacgcctcagactcgggggtcttctcgcggagggctagagagaggcgaaactcagttttcgcaagctttcttcagcgacgaccctggagatggtgcgattccggtggatcgttggggggagctcgcacgggtcacgcttcgacctcctgattagcgatgtagttcaccaaggcgatgtactcacgaacccttgctgaccatccggtctgtgagtcggctaatgtaattcgctggcccgggtgggtattttgtagcgtgaaagaaaagagactgagtgggaggcgacttctgaagtcacgagatatatgtagattccattcggaaccctacgcggagaactcgtccactagtacgatgctccgggacactcagcgagcgggattggacaggaatgagtgacggccgaaagagacgttttcgacattcttggaatgtccaagagctttgtcgtgtgccaattgagatttatgggatgctttgtgtacaaatgaaaaggaaggctgcgccgatcattaagcattgaccccactgccaacaatcgattccaacagttctagaacgagtctcttatcgctcatcgcggtcagttcaacgacgaggatcctcctggggaaatggtttcggaaacgtttcgccaatgttaggaatatgcagatctgcgcgagctcgcggaaaacgcgcactgaacggtggagcacaaacggggaggagaaaacgcaccgtcgttccctcgtttttttgtcgggagaaacgactcagctcttgacataaaatatcacctcgtttatcgttttaaagcatgaaattctcgcaccataaggctagtatacgatggatgctcgctaatccgctacggctccgtagctctccgatattcatgtggtgaatctcggatcccgcatcttggaaactcggtgacactcggtgtaaagtcgacagccacgaaaacctggaaacaatgcagccgaaagttggggaaccgaaaggagttccgagacatcctactcggtcaggattccccactttcacggcggcctggccatcagtccaacgatgttccgatttgggtttcgtaatactcactccgcactcaggagctctgacaagtttcccgcggcctatcggaaattcgctgctggcctttttcgccgtatggaccagggtggagaatcgcgggtcggaataattcagtttgggttttttccgaccactggcgcccctcgacagagcagcgagtcgcgaggatcccgttcagcgtgaccgaagatgacaatggatgtttcggtgagaccgttactcggcccctgagctagcgggtccacaggtctctctgccggatcaggtcggtcatactcagctcatgattctccatcacgacccagtttggattcatgagatgagctctctgctcgcaagctcattgcgccagtgaccgcaagtgacagggtaaagcgtgacaaggagaacacgggaggacgcggtgtcagcgagggtgcgcaagatcctgtgcacagcgtctagggcacgcgactgacaaaacaaaatgaacgtcagagagaagatttgctcggttgcggagatagcgggtggtggaaaatggcacagagagcggtaggcgaagaggtgaggccggacctcaggcgcaccgatgaattcgctcgatcggttgcttggtcgtggacacaatcacgccctgttgttgccgtttgcaaccggcggctggctcgcactgcgagtcccatccggacgaacacgtcagaagggagacgattatcgaatgcaatcgaaccctgatggaagcaggcaaattttctaggtgcggcatccgactaacaacttcgttctcctcccgccgcgtcaggccctctcggcagggaacgcgtggctccgacagatcgcggaagctgcgaagctcgaaagaccaaacaaaacgcgggcgtaatcaataatggatcagaacaaggaggatgctctgaaagtgaccgagcattcgctctggtgaatctgaactttcaaaacatcccgaggtcacgctttgggatcccgcacgacccacgcacagatgacaccggcggcgacagaaactccagcggatcgactgaatcctaaacgaacggactgacagacatgacggaagcgctaccgcaacgtcattcagagagtttccgaacgtttcggtgagatgaatgttcaaacgggcgacgctgtgcttgcgcaaggccctatgagcgtcgctgtgaaagatcgtcccgcgttttcctctggtcccccggtccggggcgaactgggaccaaccaccaggagcgtttcgaagggggcatggagaacttggtccatggtcgcaatcgagttgggtggggagggcgcatcgcatgcgagttttattcggcctccactgcttgagccggggaatccagactagagaccgagcgcgctcccgacacgggtgtcgagtagcgcaacaaagcaaagggaaaaaccgacggattgcgcggatccgcagttcctgtcatcgtcacggttcactctaagcgtgttgagtttttcctgattccccatcgctggatgcaggatccacactgatccagccgcagggaaaagtgggaagcgaatccaaagaatcatatttttctcataattctccctgcgcgcaggcggtcctgccgagggggttggttctcgatgggcctctcgggcattccggacgagttccccgttgcttgcggcggggaggtcaggattgaagtgttgatcgggccgtgatattcgttcggagagggtgtggaccctccccaagaagctagagcgaggggtatgggtcgataccacaggtggcgcgtgacccccttgttgacacagcttctatgcggccgttgagccacgtgcgaatccacaggtgtggtcggtaccgcgccaacttgctatcgaccattctctcacacgagtctgttcggcgtctctaaatgtatcgcagtgagtcggttttcccgattgaatgcctctgatgaatgctcacccgcacgggtccgtaatcttatgacatcaacagtgggatcagggtcgacgtcaatgacacaatgagggaggggagctcagctcaacagtcgtagagaacgttgggaattccgggcatcaacgattgatcggtatttttttttatccattccagagaaatcggcatttgatggaagacatgatttccccccttagcacgctaaggggtatcactcatcatcccgtgcatccttctctggcttctcagcaagccactcagcagcaacaacaatcacaagcaccgattcatccaggctcgcatcagactctcaacaaaatgacgagtctgggggcccctgaacacatcggtccttccggtaagcggaacgcaatggtggaacttcgacccgttgatcgatacgatcgacttcggtcgcttgaggaagactctcaaaatcttgtcttgcagagccgattcgtcgagcttcaacgaattccgtgcggctctcgggcgaaggacaattccagctgcaggaaaccctcagcccagtcaacaacaagttctatccttcctccaagggcatcccgcccatgccgcaagccgcaaatatgccaccaactcagcaaggcatgccgcagcaacctcagcagctacattcacaccaagcacagcagcagcaaccaccgcagccacaacagcaattccatctgcaacagcagaacgtgagttccatcgtctctcgggcaaactcttctgagcctctgcggagactccaaacgtctgtctcaaaccgtccgctgtctgtcgagtagagttctcggccagaaagcactccgaggaggaatcagagacagggagcgattcgggcagatgtcgtcacgattcggaaactcttaatcgagagatctttgcaggcggcctcagcgctggcgcgagcttcgtgggttcttcgaacggttctcttatatcaagcgccgcaattggttcgagaccgacgagtgacgcccggcagggctttcaagcggtgtatggtaggcaccgaaatggtcgactggatgttgcaggtgggtccaacggcggcgattcaggcctctctacgtcagaggtgttcgttccgaggatgaggggtcgttgcctccgatgttagatgttcttctgattttcagatgggctgcgttcatgtgcgcctttcatctcgcgcgcaagcagccggcatgtggcaggttctcttggaggagggatgtctgaaccatggtacgttttctctgggaatcatgtgccacaatactaccacaaggcgggaaggtttctagtaggcgaaccgaaaggatgctcgtgctccttgagaaatctgcgcaatgcgcgcccagttccaacactatcagcgtctctcaaatacttcagctgcacacctcgaacgttggaacgagttgttgccttggatgacgtcatccagtatggggcgctcaaacgaggctttcaatccaaagagcaagagagcaaacagtcgggctgggtttgccgatgctcttctcagaaacgccggtttccggctctgtgacactcgaaagtcattatggctgcttcgcttccgaaccacagaaacctgagagctaagagagcgatggtttcgagaagttccatcgggacgtccgacgctgaatcgggaagcgtttgagaccatagagtccttgttcggaactcccttccgaccacaatcatcttccccactacgagatgaatccattgcgagaaacctccgagctctggaacttcgagacagagaagagcgagcctctggactcctttggctacgcaaggcttcgatccgtatcgaaagagaattcacgagagctctattcgtaccaataacttcggccgtgtcgattgcagtaaccggagagcgacaattcgaggacaagtatttgttctaccgcttccgagacgacgatgcggaacatcctcgactcccgacagcggaggagagacccatcgcagaagcggaactccaagattggctcgtgtacctcatgcagttagcccccgatgctaacttgcgaatgattctgcgaaaaccgtgagcaacttcgttgaatgttacacactcattcatctaccaacgggaatgagacaaggcggatcgcatgtagattcttcagatggattgagatgtccgcctgctcgtggagccgattcttttccgtgggcgatgataatcagacgataatttgaacaaaatccgaaatccgcaaaaaaaaacgaaatcaatctcgtttttgcattcaggccatcggagagacgtcaggacgacctggacacaatttacgaagaactcactcgaatcaaggccctatcacacctgtcaaactccgtgaaaagggagctctccggtgtcatggtgttcgagtcacacccaaaacgcgacaccgcctgtaagttcacgatgtttctagacatgcacagcgaaatccggtcagcactcggagaagttctaggcgagcgaaagtattcctgagcagagctcgttcgggcagtccggcgcaagttcccggaagatccgtaggagacggttcccgacgtcaatctccgctgctcagggttccgattaggggacgcagctgactgtcttgagaaatccattgggcgacgtgagggctactcccttcctcccggatgaaacatgcaacacaacacatgcgatgatgagtctgaatgaatgaaaagctatgactgcctcgagcccccaaatgtggcagcctgagctcgtcgacaagcgcacacatggagcaacgattaagttcgtcatcttcgtggtaccagcagaggtctgaaggtggtccttcctctagcctgcgattccagacggaaacgtgctctttcggcagatcttggcccgagacttcgatggctgtgtacgaatctgtgttctcgaagaaactccttccttcgaggcaaattcgatgattgcggcaaaaaactgcctgtccctgaagacgcgtcagctgtggcggacgccattcttgagagtgggttcggattcgatcccggagccctgatttatagccaattcaaaactgtggtctcgtacgaaacaacggagatgactggccacaaataggtatctggaattcagtgggcagcttccgggctgtggctcgcgctcggtgctaccagcgtaatccgtgggatgctccggatctactcccgagcgttccacgtttgaaccaaaggttcaaatccgatcactctacttgaattgttgaagccccaatatacttcaggaatgttcccaattttacagtattcaatcaaggagacgaaggaaaatcctggtacatcattttgaagggatcggtgaacgtcgtcatctacggcaaggtgagaattcccctttcatcggttccgattcgtgttcgatgtctctccgttatcgtcagcgcatgcggttccgatccaccgtggaagtagatgccatatcattcatgaaccgcttgacattcattcgctgtttagccagcaacagctaattgttcagccggagtgaaacgcgtctcagttattgagtgacgaaaccgcgatctagattcgatacatcaaccctatcaacagttgctgtcatcgccgcgaaagcccacagtggcacaaactaatgaacgaccgcgtcgaagtgccggtcagacaagcaatcaagtagacgaaacgctggacagcttgataacactctatatttctgcttcagggtgtcgtctgtgaattgcatgaaggcgatgatttcggtaaattggctttagtgaacgatgccccccgggcagcgaccatcataactcgtgaggaaaactgtcacttcctacgagtggacaaacacgacttcaacaggatactcagagtaagttaaactttctgcatgttctcgccggtttcagccctgatttcacgctccccgagattgttcgctgggtgcggtcgagcccccggacggagtcctccattttccggaaatgaatgtcatttttgtgagagaaaaggacgcgcggagccagactctggattttagatgaatcggggaatcctgagatgtgcaccgctgctcctgaaggagagcccgcagtccgaagcatcaatcctcaactcttccatcaatctccatatggctattgtgttgatagaagtcggaagcacattgcttcatctgttctcagtgatctcaggttgatgaggccggttagactgagcgactttcagcgaatcggatgtccacggaattgccacaaaactcgttttggcgaacagatgatgcccccactaactcgagaagaatcgaaaccgctctcgaatcaagcgcaggtttcgagcctcctgcgtacgcgacgattcgccgcttgatagcatgacatcatggccgtggtccccttgcggatctgcacgtgtggaaggtacattgattttcggagagccgaaattccgacgttccgagaggactcagctcgagatatctcttggcgattgttttggtaaatcgacttggggtcttcgtgctccacatgcaactcatttgaggcgctcactctgagaaagctgacaagtgtacaatggtggcgatcaaaggtgccattgctcaatgttgttgttttgttgccgttaatgttaccgccgatccatttgcgtcgtcgtgattgtggtcacatgcaaacaaacccatcggatgttcgcatcgttaacgcgtcgtttgcggaacgcaccaattacgctgaagtggtcaaagcttttgacattgactcgttcatcaagcaactgggatgaacgaggggaagggcggatggacaccttgcgagagggcaaagacagctcgggtgtgctttcagatccgttcgtatgggataatcttaatgattgtcggagacatggtgtgagggaaagaaagagttgcagtgttgtaagcatctgttgtccatgcgaacgaataacagccgaaacttcgactttccctgcttgacttcagttcactattaagccatcacgtctaataggtatggagtcatggggttggtggtaacggaagcgaccggaccacaaacgaacgatcgttgaagaaaccgatttggactcgcgagcgatttcaaactttgcagccatgcattccagtcatgcatgttcacgatttttatttttcgcccgccttcccaaataaccgagttgagggaaacgagagacacagagacaatgactgattgagaagctgcaagaactgggcctatctttttcgggaagcagggactatgggccggaagtgtcacgttacggctgctggaagctgcgtcgccaggcgtttcggccgcaggtcgggcgaaactcgtctttgtcatattctgcgttcgaacacaattcctttcggattcttctctagaacgtttcgcggatccctcttctgccacacgatgagtttgtgcgcgaacagtcacaaatgttccaattatccaagcaaaatgaagattggttccagttttgatgtaatcttctcgctcacgacaagaccgaactcacgttgatttacgcgtgagtttggatcatatcgaaggattcgggactccaagaggcctttcggatcatactgcgttgtcggagtgatcgttccctccatccgattccgttctgttgatggcgctccaggatcccttatcttcagacgttcgagtcggcagtgattcctcatctctctgtgcacgtttggtccaatgaaagcgggaaggtagattacgaccctcgattggagctcagcatagtatataaattcgggcctccatcatctttcttctgtccacatgcatcaaacagcttcacgcgatggatagtttagagcgggaaatctccagatctggaattataggaccagatgctcacaatgatgcagaaatacaacggcgaagatgcaggagtggagcaaatggaggagctgtcagaaccgttgcgcggccagcaagaagaataagtgtcggttccaaacagacattcgatgcagatgaagcgaatacgaggatcgtcgagaaaacaaagaatatgaaatgaccgagcccgcgcaaatcccaccaagagattcgttcgtctgtttccacctttcgttacggctgcgcgcgaaaagtggctgcccctcgttgagctctttccacggagtttccactcaaccctgatatcgtcgctcagacgggcgagcatcgacatcgaatctgtccaagggattccatggtcctcatcttccgtggatgcaaacgtggtcacgctgaacgttgacagcaagcgcattggaggtttgaaccctcctgagcgtggcttcggagttgccgcttctacggtgaactggcgctaagaaatgccccggttggcggcaggacattcgatcagctcattctatcccaggaggtgatcccactttctctttgtccaaccactagcccagaaaactcgtcggtgccagtcgtaggcccccagataatttctcacaacgctcaacatgttaggctgaacgaaaacaatgccgctcgccttgttggttggtctgtgctccgttctcgagcgttttctgtgttatctttgctgcgggaaacgaatgaaagggaaagatactagacgcttggtcaaaactgaaacagaggaaggtttgtgcgtcaaaaacaaaaccggggcaaagccagaaaattagcaagccagagccaaggagcttgtaacgactgcttttgccaacaaggagcaacgaattcgtctcatggcgcctgctcgatggtccacgcagcgccacagggacgacagcgactcgtctgatacgacacatcctcagatcgatgcatggggaatctcggcgatagtggccgcgcacgacacgccgccctctgagcgttgcttcgaattttccccttcattaacgatgattctgagctcatgcgcaaatcgtcgacccgaaaaaacccgcgtgctttgctgttccggtgaatctacaagcagtgcatcccaagcgctgtaggaaaaacgtcgcgatcagtgcgttctggggacgttgttagctcggcggattgattcccagcgactgctctgacctgattctgtcctggtccgattgtttgctaattcttgcgtcgtcaaactgaatccgcagattgggcccgcggctcgagctgcgttcgaaaccgaagctgtcgctgtgccaccacgaagggcagaatcacgaacatcgacgcgtgcgttgattcgaatcccgcttgacaccgcgaacaacgggaacttggaatgcagaccgtttacatttcggaaaggggatcggattattttctcccgttgatccgatcacttgtcttgagtttactgttgatcgttccgctgacgatctgctcagaacgccggagctcaacttcactggcgtcgtttgcagcaaccgccgagctcgactcgaaactccctaaaattcagagctgcacccgcttccgtcctcatcggtgatgggatctcatgggctttccgtccgtacaacacattcggttttctcgtgattatctcggacgcagtgccatcgatcacgcgctcgttaatggagttgaactcgaacgtatctgggtgatcaaatcgacggatgtcaaccgctcccggattgatggcggtgcgtcaagggatcccatcaatcgacattacgagcagcgtaaaaaataactttttctttcggtttcgcgcgcttcccacggtgtgccgtcgttgctctcgttgctcacataacacaacaacgacgtatgatgacgcgttgcgggaatttcgtctcccatctctctcgaaactcgagacggattccgaatgcacactcggcgtttgcgccgatcgacgtgcaacgtccaccgaggcgaacagtgagcgtccagcatgtgtgaaataattggcgtcatcgcctccgctgttccgatgaacgacgtgggagctgtatggttggctcatcctcccttgccacatcgcgtccgcagacgttttcccgtagctttcatcgagtcatttatatccgacgaggattccatcgaaccacgcatacgcagctgcttgaaatatctatcgaagttcgttcccatcatgctatctttatgacccatctagaatccattcatttcattctccgacgattcctccgttgcgcacaaaccaatattgatcggggcctggtgaactcgactcccgcggcgggctgtataatcggaccgcaattatcggctgccctgcgagttttctgtgagagaggacagcggatgggtggacttcatcatttaaggatgccggtcctctcgacaggaccccatgagcataaccggtggggtgagaggcagtttgggcgtcattgagcaccggttcgaatcgtcccccttggttctaggttgcgtctgctgcgaccctctcgaagtgggttcgacccagatgtgcgcaaagggagctccctggttggtggtaaacttgaaattccgacgggatgtcggtttgaagcctgacggttgtgagacaagaagttgaggaggcgaagtcgggcatgcttttccagaaatgacggatcattcttatgttcgggccaggaaggaccagtactcggatagtcggatcgattgggatgaatcgtagtcccagtcgaatatcagccacctatttcgctatgagtcctcacgcgagtctactgccgcaactcatgcgaatctaggaacgagcaagatattgctcgttcctctgcgaacttgcagctcacatgagtgcgaccttccatgaactgacggttgtatacatggataaccagcacgagcactccgggcatcatgcgactcgttccttcgttggaggacaccgacctttgtattcatcatgatcgctggaacgaatccgccaggagcgaagcaggaatcgaaatcgccaaaccatcggctcctcgtgatgtacccgcagatttgaagatccatccagtaccgcgaggcaacatgaagggaaccacgggtgactcctgcaaaatgcgacaaggtccgccgaaagtacacggacagctcaatagactgtaattgatgggacctgctcaaccatccacttgactctatcatttcgcatgcgcacgctaatctgtgtttcggtaaacactacttcgttccacggaaactcagatcaacagtcacaaggatgaacgcagccggtttgcggaaggggaacgtacatcgtctagcatactccgcgaataatgtccggcggccatgacggacggatgctcactcagatgagtttctacgtttgctgcgccgcttcgcattccaggggatgtttttccattctggaaacgctccccatcactccgtcgactcactccacttcacgcttgctcgcccacccccgttacggcgctcgtctttggacgaagttcttggaaaaaaacaagactttccaagaaatgctcggaggctttgaaaaatgttcaaaaaatcttcgacgaagactgcgcgcggtcttctgccgttcatcgttcgctcggatttccgatccgcacaagagtcgttgacattgttgtatttcgtgttagctcgcgcgccctgcctgtttgttctccctgtatttgtgacagtcatcaaacaagccgagcgctcacgaacaaactcacccgagctgcgcaaaggactggagcgtttacggtgtcccgcctcgagccgagcgctaagcgatgaaacggcgccatttatcgtcgctgacggaaacaataggttacagccctggccgtcatcgaaacctgtcgagacccacgaggtcatgaggttgccatcaagcgaaagaagcatctttcctcctaaaaatcgttggattcaacacaacagaccttcgtagcccacgactcgtgataatcatgcatcggatcagccctccctggaacaaccttcttcgtcggacgacgaaagtccggcgccgagatgatgagctatcctcgggcttcatcccccttctccctctccacgggaaggctatcttccgaggttgggaatagctgccgagagttggtcgaacatcgagaagggcctcgaacccctgagttctttgagttccgcagtactatcccgttgggagccacctgcatctaattcagagtttggtgatcgttccggctctggagttagctccgccagattccggaattcgcgccaggtctttccagagtgctcgttctggagctctcctccatcgctgcctcttccaactcaggcaatggctcccacaggaggaaacccacaggaggaaacccaccggattcgtacgctctgtatctccgtcaaaagtcgattttcctgagcaaaagtgaacgaagcgtccgtgtcatattcggctccgattgactctgcgaatttggcgaattaccgttcggaaagtggccggagtatctcgcaaatcttccccggaccgcgcggaggggcgacggtcttcgaaccgttgtttgtgggcgtcgaatgaatgtgtctaaattgacttatttttttatctctcggtcgcctcttctcttttgccgagatcgagccgcgttcgcatcggtggctggaatcaaaatcgtccatcgcggcgcatttaagaaatatgcgaccgtccaagccaattgctgtggaatataattcgagtgctgcccacagtcccgaataattttcggcctccccagaagaactgaagtcgagaaggaagaatccacaatcgctgcttcatcgaagaagccagagcgagcgcccgaggaataatagaagaaaaataaacttgaggaagagccgctagccgcggactagaacgaacgcctctccatctagccggacaaagtatctacgcaaacaaaagattcgaccgagggtcaaatgaacgaacatcaatcgcttctttcgattcgggagaatgataaaatccatgaaaacaacagcggtcaacaatgaaattcagccgctgaaacacagaacagctcccgacgaacttgaaaacgtcacctgaaagtgcagagacctctgactgatgtcgtcgcggcttctgttgcagcagcagttctccaagtcgcttttcattggagccgatgattcgacgtgcgcgcaacaaacgcgctactcactcatcgagccaaacttttgatcgttgagctcggtgctcgttcccattgagtttggaacgtcgatagtctcggagtgttgagcatcgagagcgcggcggccttgccctcggaagcgggtttcaggccgaacttgccaaaaaattgcgaggactcctctgtggcggcccgctcggggactgaagtccgttttcctgagtttgttcggctgttcgagtcccatttgaactggagagaccgaacgtagattccgagcgtattccaagcgattccgggattattgacgtggtcgttattcggttaccgcagagaacggacagcgaacgacattctgttctgttgtgtgttatcctccggggttatcgcccactgataatgatcgatgcggatcacaatctgatcggaggtttctgacagtttcactgccacagaattcttccccgccgtacacgcaacagactaaacagcgagacccgcgaacttttccaagagtcgccacactagatgcctaactgagcgggtcgttcgttgaaattcgtgttccttgcctcgacgcttgtttcaacgtggaacagttgtcaacgcagtggcccaacgacttcggactcgatttctagaggcggtgtctgggaactcgtttccaaaaccaacaggagcgggtagaggcactcgcgggaaccagagtagggcgacgatgttctttcgagttagattttccattcaatattctccaccagaggcgatcccagtaacgattccaaagcctctgtgaacttttctcaatttattatcaccagcgtaagcgatcgacggtgatcccgcgaatcagaaatatctcaccgggtgaatggagggaggaagaacgcccggtcgaacgggcgggcggaaggagaagcggttgtgaacgcaacagtgttttgtgcttctcgaaacggtagattggctccaccgaataggtttctcaagaccacaatgaaagaaactactgttggacttgacggccttcatccccggtcgactgcttcactgcgtccaacaagggcccctgacagtcggactgtgtgtgtgtgaccgcaacttcgaccaaattacgtgatattcgctcgctcgcctgctcgattggccagcctgccagctcgtccgtagaccgctacacgactattttcggtttgcgccacgctgggattttgtttcaacacattgtagtttcttgagccatcttcatatgcgccagtttatcggcagccttgtgacggaccgggaaaatcgcgcgtggtgcgttcatcgctttgacgacagtcgatacgcgagattttcggtttaggtttgaagccgccacgaacgaaccttccaggcagggttccagcacgcggagcagaactcatcggaagcggaaacaatcttctgattggatatcggacgtaggatgcgacaaccgtggaaattttctccggacagccctcgagcgaagcgtccgtcaaatccaaactgatgaaggcgaatcgaatccgtcactaatggcctttcatggaaattcacacggtcgctccgtagtacacaaacaagcagccgtttcttatcaatactgatcatgtccaatcgaatatcggaattaccttcaaccggtgaatctttatggccgtcctgtccgttgcgcagtttctgttttctcacgcatcagcatcgtttcatttccgtgtgcgcggatctgagattgacggcgagtctcccaggccgtccgaggagcctcttaccctgctggtaccctggtgactgctgctcgcgaaactcatgaatgggttcaccgcaaaggggtcggatcttcgaacggcgacctaaaaaccgatgttcaacctgtttggaagaatgttatctcgctcgcggaaatttctcagctcccaaagggagtcattgagcgcgcgtatcggctggagacagtattacgtgatggaatggagctgctctaccaacgagctcgacaacaagccaatactgaacaataacaggtcgccgaggagtcgtaaatgccgacaaggtagatcaaggtttgaaagtttgtgaaccgagactctagagttgagcgtgatgtggtgcttttttttgcgtcattcgacgcccaggtagcaactcctgttcggcggaactccaagagaacctcagcctgtgagacacgtcgtgtccctagcagctctccaagcgaccgacgctggacagacaaagtctggatccttggaagcttccttctatcgattcgagaaaagatacacccgcgaaactcaaaattccggagagtggaaagggaattatcgcaatgacaaccacagcgaaacctcggccatctgatgtcttgagtggctcactccgtttgaaatcaaatagtcaagagataatgaagctatattcccctcgtgagtgacgttcacgcgttgttgtttgtgaggggagctgaaaaaatccttccccaagccagccgcgaaccctctcccgcgtgatcagctgcgcgttgcggcgattctgacagaaaatgccggcaaaccttcgaagcagtttgagttctcacgactccggtggccttccgtaggtctgttacgttcactgagcactctcactccaccgcgtgtgtgtgttttttatacgagttcttcccctccggtctgtatcgacctcacccggtggattacggattctgctcaaaaaaaagtcggggacttctcgttcgaagtgatcgagggattccatgcgcgggacggctctggtcatcgagtgagaaactacagatctgagaggattaccggctcctccgtcacttcggtggatgatctgacagtctagtgaatcagttctcggatgccctgttgctgagacatcggtttgtcgaacgatcgtcaaacggtgtaaatgtgatcaacaagcagttatgcaaaatgtgagccggctgtctgggaagcttgaaaagtgttcgatcgtcgaagagtgcaaggagtgcccagattgcctcgatccccactggtgttgcagacccttgaaggatgttgtgcgcctgttcagggagtggttctgcttcggatggaaagtcaagttcattcttgaggtaaatttctcgcttatcggacgcttggtcaagtcaagttactacttctgaacgatcatcagtcgcccaccccgtggcagctccggcgaagtggattttcatcgaattttgtcagatacgttatgatacaaaaggagtgttcgacctttattcgaactgtggggcgacttagagttccgccgtcgctctcgattcgcgtgattgaagagctcaaataacgagaacgactctcagatcacgtgaattcatagttggcggcctggatatcgccgccaggtcgctcatcgatccaagctgagtcggatcgagggtgtccaggctcttggaaagaggaaagtgtcctgtcttttatcattcttttcgcaggagaacgggagtcacaatcgagcactgaatacacttcgggatctatgtactgatcccatctggatccttcaatctccagactgactttcttctctcgattctatcgaggagacaatgatcacagggcaatggagggaacgaatgaggaagacaagtcacgaatcactgtcaccgtatgcttggcgaccgtaaatcttccgccagggaatttcacagaaaatccgttgattagagttgccagtcaccgtgcacgctattggttcctgatcggagcgatcaaacggtgcggcactaatttacgaaaggaaacactcgaccttgtcgcgtccggctctttcgataacgagcgagagcagcgacgccgtgagcttcagtatcgacgacaatttgtgaaggtcgtcatcgtttattgtcggctgaagatgtggaccgcgactgggcccgcggcgttccaaaatcgccggatctaacgtgttgatctcgtacctcttcctcaccaacaagccgcgtggattaacgaggtgtgagtcggaagctcttgtagaaagagataattcgccttcgtgttcgtttctcccgagctcgtctcgtaggtccgacggaaaggacgataaccctgcatttgacattccatgcgtgaagcgatgaagagcgaagaaattctggtgaggatttcaccaggcctcctcagcggtcacaactcgtcttcgtgattgtcagcgaggcatcgctcagttttgaccatcttggaatgattccgttccttggtcagtagcggggtttccactcctgaagtacggtcgccgctcttctccaaggatgcacagatgaagtaaaccaacgagtggactcacgaacaggcccaatcttcaagaacgagcagacccaagttcacacaatgacgtgctgaactgttggtttagttgatctaactgaagtcaaacgaagtttgcgaactttgccaccggtccaaccgacagtgagcggggccgcgaacagtccttggaacgtggtgaaatccagccctgcgggaacctgagaatcgaagagctcgctcgcccgagcgaatcaaatacctctcgaagtccaccgaaaaagacctctatcgaagaatattctgtttttttttttcggcatcgcaacccccacccagcaggatcctctgctctgactctgttttcgtgcttatcaagcgtcgttctccgctcctccagtattctgaagcgatctccgagtcttcctacgattttcggatcgcccggatgctcctgtggcgggcatggcgtctacagcgaagtttccgattgcaacgatgtctcttcatgaggaccatcgttgtgctcaaagctgtgcgtggctccgttactctggatccggatgagatgcaaggcaacaacttgagttcctgatgagtggcttcgggaatcacccgtaaccaggccagcggggcggccgagccgctgggcagttgttccatctgggggacggacggacagacagatggcttctaagccggactgacggacgaacggaccgatggacgcgagagtcggtgagcagaaagtgattcttacaaactgaaagatgagagaacgcagaagagaagaacaccagaacattctgctgctttctgttgagcaaaacaagaaactcgatgggagccaaacaagcggacaggccacacaatcctggctcatgttgctcaggggcagaatgcccggagtcaaaaactcaaaggtctcagaagcttcgcgggccctgaaacttatcggggtgtatcgaagggatgaatcaagacaactttcgaaatttaggaagcgaagcgcaaataatcattttcggtgatcccaagtcccgaacacgtcggagttcgttcgttcctggttcaacctgcaaccagaaagccaccgagagctcggatcccgggtccactgcccgagttgcagcgcacgttgcagggccgccacgtggggggcatctccctcgcggaatggggagaacgattccatgttctccgtcgatttctgcgaagcctggagcgcccaactcgaatctgtggcgcatcgcagagtagctagaaaaacagagataaagcaaatgacatcccggatagaagagcggcaacagcaaagcaaatttacgatgtttttctgagccgacacaacgacatcggaacgctcgtcaagtggctttcaactgctccggtctggattaccaaaacgattcgcagtttgtccacctgtctaccggatcctgggccttgaaaaggttccgtttttgtctctgttgctcatttcttgagacttggcaatggccgcctgagcttagctcgcggtgctcttgcctaacgttgacgctggacaaagtcgtcagacacatgagcacaggatcgtttgaacggagacgttgacaacaacagcaagcacggcgaggagaaatagcagagggggagaacattcaagctgggaccaagctctcatttcctgtccccacaccgccggtctgagcgagttcaccgagccgaatcgccagttcgcggtccggtgctcggtccggtccgttgacggccagtggtcattcaccaggggtagtcatgtcgttgcgggtcgtcggaaaatctcgaagcgatcgatcgcgaactggattctgccccacttgccccgcgttctcccagggcggcgaccgtttcctccttgggacttgagggggactcagggggcctcccacgaactgtcgactcgaacagcctctcctgcttcgagaacacctgtccccaggtgagagatctcgatacaaccaatgatctcagcggcaatcgcgggattgggcctgagtggccttcgtcgtccttgcagattcatccggccacggttatcgactttgtcgagcgcaagtgatgaaatcgatgtccgcttgggcttttgcttcgagaatgattcccattctcttcgggcaaaggccggactgggtctccgagcctccgttgcctctcggtagaattggacagatcagtacgtttcgagccagtctagttgggcgccgagctgtctgacgtagattatggactcatgaataagaagtctggagtcgatttgttcatccatacagtttttgaagcaatatatttgcgcggtagctgcggacacgagccaagcatcttaatcgtcaccgtgaaatcaggattgggagcggtcaatcaatgagctatccagccgcagtttgttcgagctgcattctaccaccgactttctaccaacaaaaaaagtgatgaacaacactagccgagccgtgacaggtccccagcagcgctttaccgttttcgattctatggacgcgctcattagacatatttagccacttgctgtccacgaaacgctcccagttgtcgattattttcttctttgtgaacaaacagcgggctctcgattgctcattgaaactctcgatacggataccgtgaattactcgatcagtggcgttgttcgcgactgtgatgccagcgacggccacttctctggatgtaaaaaaaaaataactcgtgtgatacccctctcatccgctccactccgcgatttctgaacaggaattggaaactgccatattgacttgatagagcaattcgcctacttcagaaaagaaccacagctatttgtcaacaggagcatgtatttcgttcgtcgcatgtctctcgaatgttcttctccaggaagattgaagataccgaagcctcgtcgaggggcgctgtatccttgtctgatgattttctaacggttgatgtcagggttaaacttttggagaacggcggccaagttaattcattcccacgcggttcgtgccgatatatggcgcaggatcacactgatctcgactcggaatccgctgatcgattccgcggaagcctcgaactcgtcccacgaagcgcttggagtatcggatggtaactcacaagcttcatgcgtgtgcttgagattgaacaacttggtgctttctcgcgttttgcaatggcattcgatttcctcgctcgcttttgatatcggtattgcgtcaggactttctctgcgctgtcgaacacaagaaatttatacgttccttcgcaccatcgcttctagccggaactgtcaaggtgtcaatattcgttaggaaatccaaggatacaaaggaaacagtttaaacaaatcgtgacgttactctcctcacgattgccgcgtgttgtcgttgtaatccttcatgctgccattccatgagggcaatcgctgttgatgatggcactttagcggagccgaattcatcattgctcgtttcccatgattggtactctgtgaagaagagtcgacttcgggtacgtgcacttggtaaggttcttgtgtggagctattggttgttatcaggctggtttgcaacaccaacgagtgacagcggctctgcatgcgccctccccaagatgaaaatgaaatttccaacgcttgattgtgacgctattcttcgatcgagcgatgccaaacatcgatcgtcgctctgttgttgtttgagaccagcgccagatgcgagcgattatatttcttgagcagcgggctcacactttcctcatcgttctgtgaagacgtcgagcctcctcactcatcgatccgacaagcattgttcacatgcaaactcattaatcggcatgctgatgaagtcattcagcgtgagaagacaatggaatcgaagaagattttcggcatccctcccccggaggaatacaaacgaagcccagaagtaccgagtcgactttctgccattggaatttcaacttgagtgacttcttctcctttcgagaatacgttgcgaaaatcaagagaaattctagtatgttcgatatccagttcgtcaacccggaacggaatgaaagagtgccttacgagcgctttccaagaaatggccgtgactggcgttggaaggagagaaaggcgttctcctgaatttcccgggtatcgctcgcctacaatggatcgcatctcaggatacgcccagtcttcaagatttcacggaaaaaagttcattgttcctcgcccagctctcactttcatctcacgtgctcatttataccgtcagtcgccgcatgcgaaagacggccggtcaagcctgtgggcagtcttctcagtcacggccgcgtctgtcaaggccgtcagtttcggttgatcatcggcaaacagtggatctgcactccctttcacaacatcaatcgatctgtacaaccactnnnnnnnnnnnnnnnnnnnnnnnnnnnnnnnnnnnnnnnnnnnnnnnnnnnnnnatcttgtttgtccaaaaatcggagtcacttggattggatcgatgcgcgaataccggagagaaaactcccataaaccagtgggtagctctatcgttcccgcggctggaagcaggggattggctcatgaccccggtcggctttcccagactcctcggtctcctatccgacaggaattcgctctttccctggttcgccgatgagcgactgtctcagttcagggaactcaagattctagctcgcggtcagtcgattgtcctctgcgcgacccaacaaccagctcggctttgaccgttgaagatgacatcagcgaatcgaagcattgacgaattgcccacactcgcagcgatagagacagatgtatctaatccggcgtcgcatgactcaaatagcacaacgctcttctttcatatcggagcgagatcctcgcgatgcgcgaagttgttgctctctcggagtatgacaggcgtcacttccgggagtgttgttgttgttgacaatgctgctgccctcggacgcgggccggcccgcgatctgggtctcgcgcgagagtttcgcttcgtcttctgaggtgccgtgtattgttacgaaatcgcgaggatcgatccgcaagccgcggatagtgaatcacagacagcgaacgagcgcgagggcaaccgctataacgataaatcaggtctgttcgaagttttcgagacgcgagtcgtgttcgcgaagggagccgagctggctgagcagacaaagacgatgctgatgaacttcatgccagaggaaacaaacttgagacttccgatcgaggcatcagacacgcaccagcaagcgagcctcgcagaatcacgccactcgtgacacgcgcttagaacagaatggatcagcgttccatgtgggtggggagcaccggaacgggcggaagatctttgttctaggcggatggattagaggaagcggattcctgttgattcctcaccggagactccggaaatccgcccctcgagcaaagcgactctcaagatcgacccacgagtgaatcaatctgcgggaatcggcgaagttcggtcggaaccctagttaggtaatttcctgcgttaacagcgtctcttagcggtcttccgctttcggcgttttcgtactccgggacggttgggcgatagcgctgtcccagaattctgaccgcgggaagacggatcaaaacctatctggagcgaaatttcgggaagaaaagttccaacttacacgtcccggtccgacgagtggaaatggatagaaaataggcaagagaagaaatggagggaaaaatcatggaataatttttgtcgctcggtgacccgttacggggaagttggttggaccaagaaactcgtttcgaaacaaaccgggggccaacggaacaaaatgtaggacagaactagctacagaaagagatggacctgagaaaaatgaattgaactttttttgcggaatgtcttccagctctcccagtaaagtacacgaaatctggaactagaatcgataggatgcattcaccgtcatttctcaaatttctctttcggagatcggatttggatcgcatgccagacgatcagctaactcagtggttggagcactgaatgtctcgtcgaaagcgggtgagctgatcacgtagcacattcaggatgttatcttcgcggtcacaatcactgtcggaatctaaatgaatattaatgacatttttctggaacaaaccagagattcgcttcgatagaattgagaggccttcggctgcgaggatcgcttgcccgccttatttctcctgtgcgttttcctcctcaatcaggagctttcgtgactacggaataaccgcggtcgccaacttccatgtgtcgttctgccccgacgacatgaattacgagttcatctccgacggcttgtagtccgccccagggaactaggatcgtgagcgttgtatcttcgcgaaggataactgaatattcgatggcgccggtgatctttcacgatagtgttgtcacgcacagtgttcgttcgatcaatgtatgacgaagaattcgcaaaagcccgatctttgttgagcccagggtctcagtcctccgaggagctcgaactccgacgccgggctctgagccatccgaacggagggttctccaattcgttccgagaacggagaggtctcggagggttccgcgacgcacaggtttcccgattccaaaatggattcgtctgctcacgaaaaacgctacagagttacatcattttaagacttttgcttttctcaagagaagaacgttgaaaccttgatagagtatgacctcgcctcaatccggagcggtcgcgaacagccgggaccgtgattgtgaatttgaccgaatatgcagttatatattcagccaccacagacagcatcattgtcatcatcggcgacagaaaacaatggtttttgctgcttgccatgatcccgctttggtcaggttctgccgcgaagcaagatctgctcaatgttatgcagatggctcggtttgaatttgagaacttcgtcgcggcatagtgtagcgcggaacggtggccgccgacagtcgggctttcctctggggaaatggacccgatgaaaggagcaacgttcttcgccggcacatcgccgatccgcgcgtagggttcaccagtggctcacctggggggagggggcggggatcccgaaaagtcaggatgttcctggaggccattcgtcagaagagagagcgcttcgcccttctccctacgccaggggaaataatgggcacgcaccgatcgccatctgtttttccggcacggactttacacaagtgttagataccgcttttcgcagccgggatgcgagcccgttcccatgtgcgtcccgtctcagttatcccgttcgatcaagttgggatcgtttcctagtgaaactcctcgaagcgcgcaacaatgtctccgccgaacctggatggaagacatgatgactttctcgggatacatcgctcaaatatctcgagagtggtgccttctccatgggttacgcagaccgctctccggcgtttcgaccgtcggccttttggcctcggagggtgcgtttcaaatatggaagtaccatagtcggccggaccccgacggaacagcaaggttcgcgttgaatcgaacacaatgtgctgctcgctgtgtgcagtgatcgcaggtaaaatggaacaaaaggggatattgtctctgcgatgaatttggattcggatgatgacagctttgctgcaatctaacgctccctccaaggcctggtgaaaaagtaaacgatttgaacggaagtcctctactcacaactgagattgggcattccgtctgtctcagacgaaactgccacgtcccttcatgatttcttgagcggattctgagacaagatcattctgatcagaccccaacaaatgtcagccggtttcagaagggacaagtaaggaagatcattccacaaatcacgcggtggggactcgctgtgcacgcgacagaaccaagagtttcctgaaccgtcctcaaagaagagtgcgaacaatccgaaaaccagaaaaaaaggaaagatacaaaaatggaaagtagggggacaagatggaagaagcccgaaatgaaaagcagcgttcgttcaaaagacgttcatggcgctcgccttcgattccgccgttcactcagagcgtggagacacgtgctcgagctgatccaaatcgctttcggaaaagctcatgaagcgatggcagctcgggaagatgtttcagaactgagtgcggagaatatgaaggagaggaaagcatgtcgaatgggagccggtcaactaagtgcgcaggcaacaataaaggaaaggaaaaagccgaacgtcggaaaagagccgattcccagagaattcgccactttcatgtgttgcggtttttcgtcaagggtttaaagctgcagccgaccagtcagatactcattgtgccggcgttatggcgatccgtgttgaaacagtcgacgtctcgctccgctacgatcagacgcacaccaacaaacaccacagacaacagctcggcagacccttcggagaacaagcgctcgacgttatcctaagcaatactttgtcgattgagagccaaacagcgagcagatgacgctaaaagcgacccgatccacgaatcgatttcaccgaaaaattctccggaatctgattgctcagcggaattcggatttgaagctgttcagcagttcagacacaacagcaacaatcgtcgcaaaactattttcggccgagagtgtaatctcaatcgaggtagccctgagcggattgaagtcgggtcctagttttgaatttgggttcccaagaccaggctgaaataaaagctctgataatctgcgtgtccggtccgggccgcgctgtccgtccgtgcatccactcggcggtcgcgtcatacattccctgaaaagttagaattatcgttcccgagaatcagcgtcgagattgttacagtttacaaggacagcaaggctcaaaactcgcagctcagatgatcccgaaagagacatcacgatacatgagacattcgaaagcacccaatcttgtgcatgatcttcgtgcctgatccagactacgtttagaaaacgtggttcttcatggataaagacatgcacgaaaggtgttcatcttcgtccacatggtcagggatttgcggacggaaccgctgacttgagcgagacctccgatgaatcgttcccgaaaaatgactttccacttgtagcagtcacagctatcccgaccgactcttccgccatgatcgaagcaacagagttccgcgggtcacacgcgatcgctcagaacgaagcaggatttctaattgaattcagcgaatctgagtttgacaaagggaagacgcggaggttcttaagaagaatctggtttttggtgctgaagcttgtgaacaagttgtgtagggtccgaattggggactgcgagcagagcacgagcgcggccagcgattccgatgggaattcgtgagcctattcgtttaatccggctaaaatttgacatgatttcgtttttacatcagattctctccaaatgttcaatgcccgttcaacaaactgactggctggctgcctggctgatggcttactgcttgaatagacgggcttgaagcaccacttccgtcccggttgtcttgaacgttacttgggctccggctttccataaaccggatgggatcgtgggagatgaaaatcctctctcgctctcgctcgagcagtcagtcagctgatggacgccacgctgtcgtttggctgcttctatttgaaacaacagactcctccagttttaccctttccaaccataacgacggcgaaagttgatccagttaagaaatcttggccgttggacggaaaaatggtgttttgaacctgattcaaattcgtgttggggccaaacgctttgtgatagcgcaaataggagctttgcttcagggggcgtccctagttggaaaatctctggagggaggcgatggagacgcgttacccggacaatgggggagcgaattatgatgtccggacttcagatcgttaaaggaacccgagctcctattatcaaacaggggagcaggagaatggggaacgatcagaattcgtgcaggctcgctggacggtgatctaggttttcgatgtttcccaatcaagctgactgcggctctattcactgtcccaaactctcagtgcaacaagaaggccatcggcgcgttccagccagaaaacctcgagactgatgaatttgcttgggaaacaacccagattcggttgagaattaatataagctcacatccaagtacgaggaagatacaggttcctcataacggatctactgaaccgattatacatttaccgttagccatagactttcctgaagagatggaaacgagacatcttcatcagaagtttcaaatatttcctccgctcacggagtcaccttatgagcaggcagtggatccgacccttgaagggttcgttccgtcatggtttttcgtgggagtttttggtcgggaacgtcgacattttccccgcggtacatcaccgcttctctgttgccagaagctgcagtaatcctcgtaaaaaattatttttccgtgttctcaccctatagttctacctggaagtttgctagattctctcttccgccacgagagccgttgtttcggagcagttttcattccatcttggtcagatggatcttcgtggagtgctgcccgcgttcccgcactagtgtcagctttgattggaactttcgcgtgacgctccccctccatgaacgttcatcaatcacggagtctgtcagtcactcacttcattcgaagctccattgggattcatcgagaaagatcagcagcgtgctatcagttcgtgtcgatcttcttggactaatcaggagtgttcccacgcggaatacctgctgaaccgaaagcagatttatgaaggcgagcaatccaccggagtcactcacgatcgctctgattctcggaagcggctctctgtcggaacacgggcggattccgccttccgtctgaaaatctcaattttcgagccgcttcaactcatgacactcggttcctccgctttcgtttcctgtatcgactctcccattctgatggactcttcccagcgtcgtctcggcgttttcctcgtccgattttcgcaacgtccttgagcaccgtttcgtgaccgtgatctcgagactttcgcccacagtgttgcctattgtcggtggcgtgctgctgtagtttccattgaatgcaaagaccgaaaacccgatccgtttatacttaccagcgtacttctttttctggccgcactttacttcgtcagatcttggttcaatctagccgaaaatgcattattcaatcgcgttgtcgcagcctgatcagctggatgtacacggaagtgttcccgatcgtgaattctgtcagccagaagtttattttcattggccattcttagcgtcttgagtcccccccccggcatattgaccgatgaggagggccacgcgatctgcgggaatattttccaggccttctcgttagcttttcatccgtgggcgcctttatccgacatccatctcgggatgatcgtgaaacattcaagatgcgcgtgtgggatccccgcgagaactgtcccaacctccggaagccgaagagtacgtcttctctgaggtgccagcgaaaatcactcgctaaaaaacgtttgctttctcttcaggacgtcgaggcgaacacggttcgactgaaagaacacggccaggatgtgctcgtgttacagaaaaacgcgcaagacgtcagcggcggcgttaacggttcccaaacccaaaccgtttcgaatgtccaacaaactgcaacgaacggtcagcaaatcgccatatccaacatcacctacaatgcatcccattacaagtgagttgaagtttagaaccctacctcgatatttgagctgtcccgactcggtcaacttcatcccagcaccacatgttgttccgtcatcccatacgacccatcatgactcggacttcaagctccgagttttgttttcgagagcgttgtctgcactcattattcatccgttaacggtgactgttttgcttcaagtgggtgttttaattgtttagacgtttaaacctgtttgtggtttgatctcgcaggcatgggtatgtattatacaatagctctgattacaagcactcgacgagcctctctgatcgcccaagccgttagccatctcattcctcacaccacgctcattcttgtgaatattgatgacacgatctcactcactcgattccgctcaccttctcgctggcaaatgattgtttgcagtcggctctcgttcgctcctgtcttcgtcatagccactgttgcggtgatttgtcgtcaacgagctcgaccgatatcgagcaacgttttcgccactggatgacatgcatttattaggcgacagctctcatgatcggaagtcgtgcataggaaacacaagtgacgacgaagaggacattcgaatgccctgttctgtgaagtgactgtgatacacttgccgaacccaagcatattaggatcttgaacactccacgatggggaagcagccttaatctcccgagacaactcgactccgcgttgaagtgatcgcaagaggtgttattcctcgagaacgctcctggagctttcgttggttcgcgagtcctcggtctcgcgtttcccaaagacggtggaggaagaagagcctcgagctagagtttacgggttcgtgttcgcgaatggacgcggagtatagagcagcccgagccccggaacgctcgccgcggacacagactgatattctcgccgatcggcgtgttcgacagtcgaggtggatcagaagccttcccgaagttgacagagccaaagttgagctgctgctgattctggcaaagatcgccccaggggggcatttcaaagctgggtcaacagatacagccgcccagcgatccttcgatctttgtctttcatctctcgtggaaacccactcggaatgagcttctgctcgacggagccggcaaaaatgcttttaccagagataaagcaacatcgcccagctgaacggaatttcccttcgaatttcgattcggatcgtttttatgagttccgacaccgggactggggttgccgttgagcatggttgtccgagtgcttattttttcggaggcagtgtttgtctagagaggattcttccgtctttctgctttttgtaccaaaacacaacaaacgttcttcattgcctcttttgaacctccggcttcggtcaacagctctagccagacgaaacatgttcgtagtgcttgttaaacgaaagggcgctttccggcgtcctagaccaccacgacaacgtcgaccctacacaaaaaggtacacgaccgtcgctgatcacaataggcttcatttctagagtaaacaaaaccagcagagggagaagaacggcaagaaaggaccccgacgacggaatatgtggcaggaatgaagcgcgcctctgttattgcatctgacgttgtgcgactcggcagctgcaagtttccggcacttcagcagaagaaaagggtcgattagttgaaccgattcggacgcagacgggcatgcgcccaagaacggaaagaaggaaacgaggagccgtggaaaagtgttcgacagccaggttgcttgtagaatgttccgtccgtcaactcttctccgctagccgagcgcctccttctcaaatcttgtacgagctcgatgatattgatgagaacgagcacgaaaaatcccatgtcgacggctgttgttctttcgtcacgatctatggacaaagctcggaacatctccgacctgattcgaaggcttgcggagaaagagttacagatttcaccggcgggcttctgaaaacttcatctcatcaatcggcgggaggtccctctcctaaaattccaccgcgttcaagggcgatgctcgcgaaacctggatcgaaaagttgatcgtggttgctgagacgttatcactcagatgcagcggcacacccgggggcagatgctcaccctgaaactgttggctatgcggaaatggagtatccccccccccccccgaaactactggaggcgcaagaactgaatcggaatgcgagagatcagtgactagcaatgcttaacctcgaaaaaaaaaacacgaggaatcgtcgcagctcattctaacgagctccttgtcatgtgcttataatcagggttggatcgtatacgttcggaaaaacttcatgaagagcaatgatgcggcgagtaatatatcgacgaaaattcacggaccgacctccctcaggtacaccgttatggcgggtacgccacagaagatgctggagcacctccttgaaacgcgcataggagaacggaatgatgaaccacaaagtaggttgaggaaagttctcagagggagcttctttcactccgggcgaacgttcgcgtcgaaaacagcctgtttcatcactaatcaaatgagtttctccctcaactccagtctcctcgagcggcaccacggccgctagcgcggccgactcattcctggaggatttcttgctcacgcacgtgatcttcatgccgtcacatgatctttgtcctgaactcatgcgtcactacaggctagatgccgttaaccaacgacaggtttgtggcctaggatctttctgctgcttcgcgttctctctccttcaaccgcgaatgcgaattacctaagcaaggggtcgatcgagacgagcagagtaacgaatctccgccgtaccatcaggaacgggagttcatattggcttcgaaacggcgcgtggttcaattcaccgcgcaatgggcggcgattgtgcgtgagccattctaccaggaccatgtcatccagtgttttctagaagagcttctcaatgccatcgaagaagatcgacagaagtacatcggtgccctccaagatcagctctcaatcgtgaaaagactcttcgagatcgttgacaagtgagtcgactggacgaaggaggaaatatgcacggagaaccgttgatttctcaaggagcaatgctgagcgtgaactgattcttggttcaaacggtcgactcatagctctggaaccaattccaggtaccgatcggatcccagcatgacgagcggtcaaaaatggaaggtggacaccaatggtcagatccgccatctttcatctggaagcactcaaacagacgagaattcgcaagagcacatcataagagccatcagagataccgatgagagtacgttctcttgcgcggtagcctgaaacggcgttccctatccaccggaatttctgtcgcgaatctgttcgcggatgatgatacaaacaacagatgcctgatcctcttgacttttcagtaatctttcgcgtttactgtgcggaccacacatacgtcaccttgaaaacggccgttaaagcaacagcgaactcgattaaaaagctggcagcggaaaaaatagccttgaaagatgaggttattctcgttgaagtgaaaagtaatggagaaaagctgccttttaatgagtctgaagtttctgtgcccaccggtctcagtattaacgggagaatcttcatttccccgatcgaccacatcgatgcactcgtgagtatctcaagacttcggacagccaaagatgaattcctagaccaggtcatggctcgagttcgaatctccgcttcgcagtgctgaaagtcggttcaaactttgatccaatgcctcgcttcgcggcttgttccgaacaaaccggacgatccttttcgaagattttgcatatgactctccatggactggagtaacctagtgtttcaatctaatcgcgggattcttccacttctagacacctttgcaagagcaggacgggccgaatgaaggtactgcgaatatcttggaggcattgagttcccaagatatcgcgtaccacatgaccgtctacgagtggcaactgttcaccactgtccacgaagtaagtgctgctgcggctgctttcctactgaaaaatgcaatcgaaattctgaacgatcgatcattgacgggatgggtttgattccgatggactgataccgcctaggttaagaaaaaaaatccatccatcaacctcgactgagcgtggctcgctaaatcacaaggccccgctccgttttcttgcagtacgaactgatctatcaagtgtttggtcgtaaccagtttcggcgaatcatgtccaatttggacgtcttccagaggagattcaaccaggttcagttttgggtggtaaccgagatgtgtcttgccaactccttgtcacgaagggtgacactactccgaaaattcatcaagatcgcccagcagtgagttgaaattccagacggagtgtggcaacttcattccatgccaaattttctatcaacttggttcttttacgttatcgacgagaaatactgaattccttcgcaacgtcactttgctgcagttgccgtgaataccagaacctgaatgcgctctttgcgatcgtaatgggacttgggaacgccgccgtatcgagactcagtcagacctgggaaaggctgccctccaagttgaggcgcagttttgaagaactggaaaacctcatagagccttcacggaatcacaagcgataccgaaatgccgtagcgaagctgcagccaccactggtttgtattcctcatccgagagtttcgagtccctcaaacgcacaaattcagcggaaacgtgctccaccctcagtagtcttggtgtagcgctccttgagttgaccctgatttctcattcccagatccctttcataccactgctactcaaagacatgacgttctgccacgtcgggaacaagagctacattgacggattggtgaatttcgaaaaaatgcacatgattggacagacgcttcgacatctcaggcattctcgaagtcagcgccttgcgatggaacctccacaagggagttcgaaatctcatcacaatgtcgccgactatattcggtgggttgctcgctatcgaatccatcatgttcgagccctctgggcgttccgtttcatgctcgatgagctttcggcccgtcaggcctccgggcttacggggcctcccacttctttcgcatttcgggaagggttccagggcagctcggcaacaactccctgacggtccaaacttcgcttccttgcagaaacctgaaagtgatcgataaccagcgaaccctgaccaagctctctcaccagttagaaccgcggaggtcgtgagacagccactcgcacaacgaacgattggcagacccatgagcgacgctcctatttatcgatggactgtatcggctgcattccatggattgtagaattccgtctcaagacatttctcttctcgtctcgcacttccactgtgcacgtgcacgtgcaaaaactcgcctcgtgcagtcggtcgatgagtcggttttcgcgagatcgcatgatcgactctacagtcgacctcccccgtctcggaagaactcgtcacccctccaaacagcccgtccagcggtttctgattgtcgaagagatgcatcttccttggacctgtcattttagtaatgcaaactagcacgttgtagacgacaacgtgcatttggcaccccttcaatcgaaggagcacgcagtgaaaaatgcactcaccagcacagtactcctcactcatccgacaccgaatcacaagcacttcgagagaaattgttgatagtcgtcctgccgaaaactcgaaaggtgacgtcgaacacctaaaagtgaaaacaccgaacgtctcctcgcgtgcactcgcgcctgcagtgccgacgcgggaggaccgaatgatctcatgggcctcgggcccccgcatgatattcagcccattgtttcgttgaccttggttgttgaggtcaacgccggttaaggctcgctcgccgaaaatttgcgtcatattgtgatcgttgttctgctcgcttcagactcttctattgcgttgttggatcgtttctgtcccacccagcgccatccttatccgcactttgttcagttgcgaagcgcatctccggagggagctcgtggtcggaaccatgtgaacatccgagattatgtaaaatgtagactcatgtcatccgcatgcttattcgcgctgccgacgacagcgagctcttgcacacgtttgaactacacaagcgaaagggttgaccgagctctcactcattgtagggatagcgggcctgactgcctgtccgcggctcgagcaactcgtcaagaagtaggggcacggcctttgcgtccgatcatcccaggtcgatcgaagagctatctggttgagccggctctacaggcggtcaagatatccactgagagaatcagtttttctgagacatcgaggtcaaccatggagcgcatctttccgattctcggttatctgactcaatccaagtacggttcacgttcaagtcaggagcttcgatcgatcgttgaatcgctagccccgtcggcctagttgctcggaggtcgtgaggacgcaggctacttgtgaactatgtgcaatatttaaaatccggatgagagtgtcccgtcagcggaagaactactttagagttgatgtcttacacatcccataaatgcttgaaaatgattacttcgttggatactgttgaccaaagagcctcgcgggaacgattcctcttcgggaatcgaacgtctgccgagcgtagagatatgttagccaccaagtactcatcttcacccgcgtaatcaacacgcaacgtgcaatcggaacgagagagaaattcattgttcagaactatttggtaaaaagaaacgagatccatacaataaacaaaacaaagtgaatacatttagactctcctcatatggacgcaagcgtgcccgcgcctgagaaaacagaagttagggaggattcaaacgttgacgatcgggaacaaagacgaaaccgcaggagattctttgagatgcacgcggctgacggaaccaatctcctgatcgaggaggaatcatggagtgctcactgccctagttggcctccgggcagctcgctcgactttcgctccacgacggtcgtctccgcacgtaactcgtcctaagaatgacatttttgttctttctgaccttgatcacctcccgagggttcccgtgagacagtgatgcgcgaactctagattgaatccacttgcggaagcatccgaacccgttcagatttatcgtgtttacgccgctaattgtgttcagttctagggcgccgaaggtcgttcagtcgaacaagaagtttttcgagcagggtaagaaacgcctcccgttcgagagtcgggaagttgccagccgccgcaaatctctgacagcgccaatcagttgaagcttggaactgcccccataagtctccctcgttgccgagagggagttcaaagttgcgaatttccttaaccgccaattaaaatcgtactgttagaagtttgatgctacgagaagaggtcgttgaaatccttgtaacccctactacccgacttttgaggttgacgctgaaacttcatcatttgcccctccccacgaaactttcgtccgtccgaagaggttcagtgctgagggtgatcaccatcgactcctgtcttcctgccggaaaaataccgggcacgccccggcgtaaacatttttgttcaccggtgcaagtcgcgattccagaggggcggctcccgacctctctgtgattggcccgaacacatcaaactggtttatcacgagagacgtcgccagtttggcatgtcttccggtttcgatctccgaaattctccgctcagtgacggcggaggtgccataatggtatccgtgttccatcggagaatcttcgaaacggagagagcttcatgtccgaaggagaagcgtcgaacggaccttaatatcacgattcgttcgggaaagcggagaaacccgacagtgtcttagggacaaactcgaatcatggccaaccccatcctccgataccgtacagagataaacagtgagtaacgaacgcatcaaggatcgattatagagccccggacatcggacccatcgagaaccctcggcttcattgtttacgtgcgctggaactactcgttccactcgtcggtgattctattgacggtcccgccgtcgtttttccccccaaactgcgcttcctgcaggtagttttccgatggatgatttctctgagaaggcttttcacatcgggtcagcatgtcagtcctcccgcaaatcccgaactctatcgagatggggcactcgcggaaatcgaggggctcactaccctgtcagtcgcatcactgctgtcattcatcggaggctctaactggaattccggatcctttgttgaacggatgattgcccccatgttaaggtatggggggggggattcttgattcccgaattttcataattcagcagctgatggacgtaggacgacgagcgagtacccgttggaaagctcattcctcatgctctcagtgaagactcgccggctcattcgacggccgcaaaataatgcttcatcgagaggccct

SEQ ID NO: 87 - DNA, 121593 bp, Phytoseiulus persimilis
  source 1..121593: mol_type = genomic DNA
  variation 4508: allele = a; note = SNP_14
  variation 11697: allele = a; note = SNP_15
  variation 12229: allele = c; note = SNP_16
  variation 13135: allele = a; note = SNP_17
  variation 32979: allele = c; note = SNP_18
  variation 38081: allele = g; note = SNP_19
  variation 38220: allele = c; note = SNP_20
ccctccccccagcaaactggttagcgctgttttctcacaaaagaccgcttccgccatcttggctgtgacaacgacgacctccgtgacgacagaaacgacgacgacctgctgcatgcattcccgccgatacggaatggaacagattgaatgtgcggaataagggaatattgtttcagatctctccgttctccagaggccactctcaaagttgacctccgatgagaaatagagtgcagatcctctgggttgtttgcggtgggttgctccgttccagaagtggtcttccgctgctgtgctcgcggtttgagggatagaggtcagcttttggatccattccgtcggacggcgtatcggtcgatgcatgtgacctccgggaacgtgcacgttctccatgctcagctttgagaacagattcacttgagcgcccgtccctctaaccagttgatcgttaccccaacccccatcccccgtgattttcgccttgattcgtctgatttcagggggtagaaccctagacactatccctttctccccccacggaggcgaggcagcggcctcaaccccacatgattcgctgatcatcgacgtcgttatttcgtgttgatagctcccacgtttcctgaccaggcgcttattgtttgcgatactcgatgcgaccacccgcaaaaactcttccgtcgcccccagctgctcaccgctgcgacgcgcccttggcctctccacccgcagtccgataaactctccggtcggatcgctaccatgttggagccagggtctccctccgctgtgaaccattctccacagtcactcgctctccgcccccgacgtgatgtccaggatctcnnnnnnnnnnnnnnnnnnnnnnnnnnnnnnnnnnnnnnnnnnnnnnnnnnntattttcccgcaactccggggtaatggttcggagttcttcgcgcacccgatcgttcgcgcagagcgcgcctccaatgcatgaacgtacatgcgaaacgttcagggaaggagaaacttccgcgacatcgattacaggtaacaagaatgtcctctgccgccaccatccatctggcggacgcaaaactcgcctctgggtggatagacgtgcgcgtcttgcgtgggaggtgggcaaacgagtggccgaccaacagatgggccggagggaagagagtgggggatggaccgcggctgccgaggcagccagtcgagccgctcgaaaggacgaacgcaagaaacggacggctgcttgccacacaactagcccagatgtcgggaggagcgccacacacgagacgagggagcaaacgtgcgaggcctggacaagagaaaaagggagacgacaacgcagttgatcttctcttcgagccgccgagcgcggaggcgggaggggcagcgagcggctgagcaagccagctccctccgcgcaaacgagaatatcctccttcctcaactcgagtgaagcaacgggaaacgactcggcggaaaaacctcgctcctcggcgccgccgtggctttctcgatgccgcccgccaacccagagacaagaagaggaagaacgggacggtgccgcccacggtggcgcgggcccgcagcccttccggggcgacgacggaacaggggcgggggaggcgaggaggacaggacggcgacgaggtctgtgagagggagccgaggagatctccgaagcacggcccgacaggccgcctgcctcgtcctcgtgttgagtgctgtggcggccgataatgagagttaatcccatcaggccagccgctaagcaggacgacgactcgccggtgagcttcgtaggtggctgtgctacttcgtggcggccgctcggtcggtcgagccggtcagccagccagccaggcaacccgccagcttgccttgacaaccattcggcaggctggcgggcgagcgagcgagcgagcgagcggactgccctggcgtgttctgtcggaggagcccttgctgcagaggaacgtcagtagcagtccctaattgaagaacaaggggcagggggaggagtttgcctcctggcatacccggcctgtttgccagcttgcttacctagctgtccgtgcgacgggcccgctgggtagagagtgggaaaggcggaacgagcagagccagctcactggagctttattcattggtcgacggccgagtatcctgccggcgagcagctggtcaaccgtctgaccacccggcccgaggaggcgccctccctgcacgagctgaccgggccgacgggtcggtggcttaggacgtcagtagaggaataacagcgagcacggagaggaataaaaaggtcggtcgaggcccgcggagagacacgagccgggtcgcgaggagggcaggtcaaagagagacgggaggaaaggagaatggctaaacacgggacgaagcaacgacacgagaaggcccagcgcgcaaaaaaaaaaactgcgctgctcccaccggctgttcgcccaccgctcggttggctgcttagatggctgactggcctcacttgtacgggagcttcagaccgacctaccaacagacccaccgtccgcccgatccgccgaccgggaacagccgaacgagcggacgtacggggcgcttggaaccctcagaggctcttcgccgattttctctgctcgccaccgctcgtcgctttttccttctccacagacagacggacagagagccgagccgccctacagccaacgaaccgaccgttcgcttaagcgaccctcggctctagttgaagctagacgagccaacgaacagacacccggctcgatcggaagaacggcaaagggatgagcagacaagagccggacgacggagtttgttctttcctcgtttccagtgggtgcgcggggcgatggctcggcgctcgtatccgttattcctcaggtgcctgattgagccggtttgatcgtttccagcttggtttctctccaacccagcttccgaaccgtccctcgccctcttcaatttgtgaccgcgaacaacagcctcgttttttcggactcgtccgtcgactgttctgtttgtattcggactactacctatgtcctcactccggcttttcaatctgttcttcacccaagccgccaacgaacacggttggtctcacacatatcagaggtttccccttcgagaactgagccttgaagtggttccagcagggcctttgggttacgcctcgatccagcattttgtatacaccgcgtgccgaacgtacacatacatgggggtttgacagcgaggatccagagtcaaattcgactgcttcgctcgcttggctgactacctgttcggctcgcgggtagatggcgggtgggcgagcatgcgggtttggttcgatgtcggtcgggcgggcgggcaggcggtcggtcggacgatgggtgggtggatggctctcgccgttcgccaactgactaccgactcggagccgtcgcgactagccgaagccaaccagccagggagcaaccgagtgagcaagtaaccgtgcaaacgtgccggggaaccaacgagcaccgcaagcgtgccaaggctggtctcgctgtcgtcgtctcgtttggcgacatccccaccgcaacctctcatcccctgccccggagacagtttctcccttgcttctccccgtcgcggcgactccctcttctctgctccctgttgccaccgtcacttggatagcgtggcaacaattcccctagtgcgcggtgtccccatcgccgtcgtcgccaccgccgccgcggctgcctccgccgtcgtcctccttaccagcacacccacccacccacacacacacacacacacnnnnnnnnnnnnnnnnnnnnnnnnnnnnnnnnnnnnnnnnnnnnnnnnnnnncccacggcagttttacccctccccccatggtcgtctctcgttgcttcatggcctggccgctccctcgctcgcctgctgcttctcccgccgtcaccgcttccgacgttgcagcagcagcagcagccgcggcggctttcacaatcaccactacccaccaccaccaccgccgccgccgccgccaccaccactgccgccgtcgctgctgcgaccaccactacacatgagccgccgtcaccaccggcacacgaagcgccgacgacgacgacgacgagtagaacaacaacaacaacgggcgcggcgaccgagcggtcgggcgggcgaactcggcaagagcccgacttccgttggtcggtgaccttatcagcggcctcacctcactcactcactcgctcgttcgttgcttcgccccctccgcttcttttgctctttactcggcgcgcggctagtcccctttactacccgctctctgtgccatacactcttcggttcgcaacggactggcacgatggctaacgctcttctttcctgccaaaaggctttacgcccgctggtttgcttgtccagccaaccgctccccagacccggccccgttcgcttcctcatcctcttctatgggttcctctattactccccgggaagaggtggccaaaaacagccggccggtcagttcgcgtgatgcagccactggtgcactagccactgcaagtagcactttgacaccgacaagcacgctacagacggcgaaggattcgacgacgttgtcctgacctgagcgacaaaaggcgccaaaggagaaatggtgttcgccgcccggcaatcaggtggggggggcggggagtggcgcgacaagtccacttcccgaagtcggtgaatctatcgggtggcttgagcagcgaggttctcgaatgatcaccgcctttcctcccgaagatccgaggagaacttttcctcaagcgacggtcacctccgaaaaacgcggcttctgagagtcggctcgccgatctcccgcgaaatgttccggcatgagtacggcgaccgagtactggccttgatcacagtcattttgaaaaagttgaccaacacgctacgcgcaggcgaacttgagtctgcgggaacccgcggagggaagctcgcttagcgcgggaacagccggatgcgaaaggaacggagcctcgtggcgaacaggcaaccaagcaggccgcgctgcagccaagcgagcaagcaggcggacggcactaactggttgagtttgtctgttgctcccagagccgcttgttcacttgcccgcccgctactcggtgcaatgctaaaaggtaggtgtagtgtcggaagtagcggctgtggtggtggtagttcaatcgtgctgttcccaccccttttctgcccccgttgcttttgctcccgcgctaccggtgatgttggttgaggtgggctgccgctagcgtgctcaccaagagttagcggcaagagcgaaagaagaagcagcaccggccggagcagtgggacctctacccagaatcaactgagccagtcgtggagggctctgtcacaaggagaaaaaaaaaacgagcaaaacaatattaatgtcggcatcagcgcgaacatcgggacaataacacgtgtcatcatcaaggccgctcgaaagctcgttcgcagcccccctgctaaagaggagggcggatcggcggctctcctcacttcattctatccaaatcacaaaacaacgatcatggttttatcggttcgtcgtcggtgccggaagctcttcgtcgaaggaaaacaagctgcgttttttgcgcgagtctggttcgatgtccatccatccgacaacaaaccaacaactggccgaatgaatgaccggggacacgacgacaacgaccaaacaaactaacgaagcaggacatgcttctggcgttgcaatcgcaatcgagaactccgacaagcgagccagcgacgaccaagtaactcgtccctgctccgtctccgctcggccggttgttcgctcgtgcttcttctgcttgcgcttagtctgcccccgtcgccttcgctaaggcagagctgcggctgctgatcgtctcgtttcgtctctccgcgtttgaggcaactggctcctcgacggcacagcgggaagggggcggggcgaggagggcgcccgctgcccgagagcagggcaagccttcgagcgagcggcgcagagcgggggtaggcgggtacagaacggtgaaagggggaaaggcgaagcgtctactccctttgctcccttgaggcaacgctggctggcttgctcgctcgtccgccgccgccgccgcacacccgctggctgtcaggtcttttctctccgctgcttgtctgtgcttctcccgtgccagtcagccgcctccgttgcccgcctgcctgttcgcccgccagccacccatccagtcggccatctagccagtctgcttgctcgctggcccgcctgctgctgcttctctcccccctcgcagccccccaccatcaccaccattgccacgaccgaggctgctgctgcttctccggtcccctcccccgctctagccatcgttgcccaccgcgcccacccgctcgcccgccgcaggaggcagcagcggccggctcagccagctgagctcgccgaacgttcgctagccagccagccactccgtttgcctcgccggtgctctccatgttactcgtccgctcgttcgtttggcgcgctttcttcctcccttcggcgctctccgggagaagagtcgcggcgagcggtagagtgagcacgtcctcggggggcagcggagcaaggggtggcgggcaggcggcggacggacgggagagcatcgcgggaccaccatcacaagcagcagcagccgcagccagtttgccatccaaccagcggaccgaccgagcgaccaagcagtcccccacagagaaaacccggcgcgcggatgagcgaactggagagagcggcaggaacagaagaggcgacgccagtctgccacccgcgggcgcaaacgggaacgaccaacggcccgacagtctgaccgagagacagaccgaccgagcgctgtgagccgagggccggctgaccgaacaggatgagggtgagcgaacgagcggaggggagggggggcgcgaacgacgggaaacggtggggcagtcgggcgggccgctattgccgccagctcgccgttgccgctttgctgtcggacagacgttgcgactaccgataggcctcaggttgcggaatggtgatggtggcctgccgtggtggctggctgcttagctgctcggtgtacgcagcttgactcgttgatgctagttatcctagacgatggtgtttttctaccactttcgcctttattggcatgacgtcatcgatgcggatgatcaccgtgcgcaacgcatgacatccaggtggtagaaccaccgttttcactttacctcttcgagggggagagaattatttagagttgcatgggctggggcgagggagagaggagtttaattcccgtggtacgcaggaccttttggggccgcgtattcaccccggtttcggtagattgcccggtgctattttcttgtgtcccgtcgtcggacgtccccgcccaggaaggaattaaacaaacggaaaccttgttaaccctcgggccaaagtgttcgctgaagcgttcgcccacccacgaacctgcgaaacttcatcttcacatgaacatctctcctcgacagatgaagtgagcaataacaactgcagtgtcgacgattgacttctcctttcggattgagggttgcgcgaccgggacgtcaacttgacggaacggtatgtccgtgggttccctcattgggaatcctcagcgatgtatggcgccaccctcgcgactgtcacgtgaatgtttcccggctccgtctcatgaacggatgctagcagatccaccagatgggttgattgactcgataattaactgggtaattgagtagactccggatcatagcggccgtcgggagaggaaaagtaaacactctactgatatagagtctcaattcatggagtcaacaggccacgggcgtgttccttagaactgttgtcggtcggtctgtgcgaccgtctgcaggtccctcccggtccacagggttcgacagaacagctcggtagagtccccgactcaaacaagcatcgctctcgcgactgttgccaacaaacggtgggcgcccgccaaccgtcattagagagtcaactgtgcgtcgactgcattgtcgtcattagccgccactatgatagcaccgagcgctgagcatttcacccgctcgctcggtcgcgcatactatgaattttcactcaaagcgaacaaatcggctgacagatgaacttacacgatagacgccaacggatccacactcttttccggagatcttgtgcggtgtcaagaagagcactctctgaatatcggtccgtagctctgtcgcctcattctcccggcagactaattgactgcgcggccagccagccagtgagaccgccagccgactggcgacagaaacgacgaccggtggcgaaatgagagataggatttgacaccaaacagagtaaacagcacgagataactgaggcgacagacgactcgccgcgaacagactctacggtggcggcggcggctgtggcaaagtcactactattggcagcaccagaggcatcaccaccaccaccaccatcatcatcatcgtcgtctcaccaaactaaacgaacagacagagaattggttcgcactgaccagggcgagcgaacgcttccttcgcaagccgcacaggacaatgagcggccgggaaggaatcgaacatttcggttactgacgagctcacggatctccagaatatggaatcgtggcgccactcatatttttatgacaccgaaacgcgaattcgcggccccagactatcgccggcgacgggggatctgggaacgcgcgaggccgcgcgcaacctgcttaccaataattggtaatgctggtgagagatggtaaggtggttcttgacttaccttcgctgtgcaccacccctgggccgtgacgggaattcgatgtgcctccttcagagtcggagtccacaatcgcttctgtcgtattgtgaggctaactaatcggtcacggtaaaacagtttttatcagcgctggcgaaccgaaagctgtcgttagctctgccagacctcagaaacgtatggtccgatcaagaaatcgtcgcttcttccgatcttcacgcttgcgtcctggttgtcaatagaacggcgggttcgaacggtcgcggtggtcgagcatctcgtggaggagaagcacgcagctatcggttccggagcaaaagagacgatgctctcctcacaacggctggcagacaactgactgcctgccggcttgcgcgcttacttgcctcgtagccgaccagccttcgccagtcagctaggcagccagccgtccttccttcctccgtgcctgagtccgcctgtcgctctgctcgagctagcagccggctcgcccgcttgcccgccaggccgttcgcttgcctgcctgcccacccaccatcaccgctcctaccacccgcggcagcagcagcagcaccaccaccaaccaccctcctccgatctcttcctccgcacagtcccctcactccctctctcttgttcacccactactcactcgactcgtcgccgacggacgccttactagtggcctgaagcggccacacgcccgtcgccagccttcttctcgcactctctcgttcaacgccgagcgccgagaaatcttctcttccgcgcccctgcccttctcctacgctcgtgcctcaaccgtcgctgggtcggcctgatccctgtcgccccctcgccgagtctcttgctccacacagacacacgcagggcggcctgctggcaggcacgcacgctcccagacacacacgcacacacacaccaaatagtgaccgctgtcgcccagcgctctttagctagacgacggctctcggcggagaacgagacgcggcgcgaaaagggcgctatgggggaggggcagcggcgttgggcgaccaccagggggcgaggcagggacggaggggggcgcagcggcggttgaaggggaacgagaacgggggacgggcagagggggaaacaacggcacagaggagtcgagcgggccgttgcagggaaaacaagacgcggaaaaagactttgggtcggaggggcggggaagagggaaaaaccgaacggggcggctaccgcattggccgatccgccggcccttccgagagatcaccgagggtcggtcgagcaagacgattgtcgccaagtggacagctctacggaaggaggcagacccagcagatgaacggccgtcggtcccgcggctcaaacgaaggcagtggtggtcggcgaggaaggaggcgggcgcgcgggagttcgggacttcgaacaaagtacagcagctcctcggcgagccgtgttgtgaagacagactttgtctgcacatcgggtggggtgcttagttttaactttgaaaaaataagacagaccagatgaacgagaaaagagggagaacgctaggagagccgaaggacacagcgcagaaagcaggggcggcacccgaggcgagaggaaccgcgacgacaaatttaattaagccatttcgttcgttgtgcgttcgctcgcccgccccctcccgcgcttcccctccggatcaggccggccgctcggtgggtcggtcctcgggccgcgcatggaacaggcgagcgggcgggcggacggccgaccggccggttcgtcagtcatgggttcgttctctgaattaagttagtcagcgtgttagcgaccttcgaccgtaagagggcctcgtcgaccgtcctctccaccccgccgcgctcccggccgcgtgtttgcgacatccatttcgattctcctgatgctgttattgtagtttctctgtttttcccttgaacgatgtatataccgagtccgaggacggacaaggacgagtgtgaaaatacgtttccgcagctggatgttcttcaggtatctcgaaaactccaagctcggagataaagaatgtcgaagtgattctggatgaagatattcaaaaaattaaccgggataggaatcagttctgaagtttggagcatactcaaatcggttcggctatgccgtctgagagtccgatgtctccaaattcatagtacaaaagcggaaactcatcaaaaactagaatttggggcggggggaacgtgacatcgtaaccctctcctcgactatatggttttcagaataatcgctggggagaggggtttcaggcaatcagaaactcggaaaaagataggcgaaaagcattgaagatctttgaggaaagcactgaaaaataatgaaataggcacccaaaatcgcgggaacaggtggcggaaatcttgtcgagggcgaggtcccataaaaaaataaattatcatacgatgatcttggaggaccaaacttgagcgtcgcaatgcccgcagttcttcgttgctagtcggaactatgtggaactccgcatttcccggagtcagccgagatgtgcggcctaagagcagagacctatggcggcaaagcgacccttctacgtctacagtatagagagggccgtactcgaacgaagctagatcggctggtggaaatccgagagctcggcgctcatatcgttcctttggagcgcctgtttaatctgacgaatgacgctgaagcctgaattttcccgcgtgatccgttccagcgtttgattgaacaaatgtcctagtttcagggattattccatgaacggagctttagatttctggggggcaacgtccaacctggctttgactcgtggaatgcacgaacgtgtgaaggagttttgactgaaatttgcttcacggtagccatgagactatcgacttccgaacacctgacgcggatctcttgacgaatacgctgcggtcaatgggcaagacaagtcacgagtatagagctctcatatgaccggacatttttttctgcgaaaaacggacatcttgcctggaaccggaaaaggaggcggacatgaaaatttcgcactcctccagataaatcgagcatgtgcgagcattgggtgagagcattttcaagccatcaacttaggtaccgtcacaggtttcctattcgacgaaaagtaggtcctcattaactgtgtcgatgggagctttctatgttcgattgtgacaaacgatgttttctgtccgaaaaaaaattcctgtacattgagaaagatttctccacttctgcattagagaggttggcgtgcttgaacacttcggagtctcacatcatccgccgttgatcggaatcaggaattttctccaaaattctcttgagccgtgttgtgaaaggacctttgagagttctgtgaatccagctcaggatgccgatttgaaacttgtgaaaattgcgcagtcaaatccagcaggagtgccaggtctgggtcatcgactagggatttcagcgacgattgtttgaatattcgagacgaacaatttgatttcctcgaaattttcatgggggttgaatgcgttgctcagaaatgtgacccagcctgtgatcactgtctcttcgggttccatatcgacgaggccgccagtgggcgtcacctcgatcgcaaagcacacctcgcgatctccagaaactccgctaacacagtcaatttatgtagccccgcagatacagagcgaagatcgatatttcggctgttggaaaagctctctccttgtcatctccttaaattactggaatcatttcgcgctctgttgcccgggaaaatcgaactcttcgggaattcattcggagccatggttgaccactcgatctgtgagcctgaaaaccggacatttcctcggttgctaaagaaaaccggacaaacggacggaaaaagccggacatttccggtcacatgggagctctacacatgaaccatctctggtgaagtactccaacgagcgcttccgaagtcgaggacgtggacatgctcgagaggattgaggatgcgctattttgagcgaaagcgaagtgagcccgatccaaatctcagagttctataccatggatatgaactctgcattagcaggcttgttccataaattcaccggtgcatggaatcaatgtgatagccaaaatgccagccgaaatttcagaaaaggctgaaaacagggatataggacatttcaggcattaatggcactctacctgaaacccctgtctacaataatcacgaatatgaaggttcaaatcatcgcatggttccgatttcttgcgggcgtgaaaagtccgagagcgaacaaaatcaatgtcgcttacataccaagatacattacataccaacatattctttgatcgacatacttgctgatcgtcatcattcggtactctgacatgcttgatgggagatgggatggaatgggagatattcccggagccgttgatgaaaacttgattccctttgttccatccctggaatgccagattgagtgttatttatttcgagagatgatccttgttagcgtattttgacagggacgagttacctcggattcttggtgaccgagcatcattcatcgaaatctcccttttttcgagaaatgtcgcatagccagaattgttcacagactgggaccgttatcggatatgccgggatgagtctaagaacaccccgaaaattggacaagaccagggatctgtagctgaagacaaggggactcgagaaatcaggcatcaaagaggaattctgttcgtcggaaaactggggcagtacgcgatgactttctcgttcgccccagcccgacattctgtcgtcccgttccatgatatctttctgaaggattccccgtattgctccaggaagacacaaaataggatattcagttaactaggtcggagcgaatctatccaacaacgtgagctccaccatgacggtgggcccggcggcttcgtcggagtcctgaggttagccaggtggttatcttcgactcgttatccctctaatttcggcttaaagtcgactatatgccatgtcgagctgcgaagagcgtgaggttccagggtagacgctgaggctagcttaaccaccaatagcggcgtgagatttattcattggagctttatttgagagtcgatgtttgaatccaatcgaacgctttcgagaaacgacttctgtacaccactgcgcccctcaatatacctcaatccgagctcgggtgatgctcctccgcgtagtgttcaccgtcctcagctcgtctgcgaggtaggactttcaaagattcctcttgaggtcattgcgagggaggactggaaaaatatttcggaagaatgctatcatactgcctcagatccattctagctcatccgcgtactcgttcctcgttcggggcgagcctatctctccatacaccgcgtagcatacttccggtagtgtcctagaagaggcggaatcgcgaccccatttgtgatcatgttctccgggctcgagaatgaataccgaccacgaaacgagggggagtttgagttcagaactcggacgtaacaggggcctcacgctctcgatgcacctctaatacttgaatccgatccgaccgaggtaattctctcttgatcagaagtccttcccaaagtcgccagttacgaagaccagggagtgagcattcttgtgccacagctccattaagtacagcggaacggatcgttactttcgctcccacgaccataactgtacctggaagtagcagggtcctgatgacatttgaagcgccgtatgactcccaatggtgggccttcccggaatttaacgttgcgcaacgagatccgcggagtgttcagagaaaatgtagttcactagaagataatcagctttcgaaggtgagcggtcaattatctgttgatcgcgaaactttctcccttctattatgaaatgatctttcataccatctgctcttcaatcagcatcggatatgcgcaaattaaccgaatcttcggccgtgatgcgcttcggggcggacgggtcgagagcgggttcaaataactgtacagctttcgctaccaagcggaaaagtgatgtaaaaattcggtccgaacgcgccgcgggtcgcgaccctcccgctataaaaagaagccgcgctggcggctctgctgaccaagagcacgatatgatacgtttgatatgctgcctggcattcgtggcctccatggcgtctcacgctcggggagccattatggagctcaccgactcgaatgacttcgagcaaagagttctccacaatccgaagccggtgctcgttgcgctcacatcggaacactgtatggcgtgcaagctcgtgatgggagacttgaagcaactcgcgttggccaggcccacactcgatctcgcaatggtcgatgttgttcgcaacgagcggctggccgacgatttcacgaggagattcagcaggagactcatacccaacgtcctaggattcaggggaggagttctgattggagaagccgaggatcacggcacgaaatcgctcaagaaattcatggacaaggttgaaaaacagaatttggacttcaatgcttcttgacacccgtcacccgtcgacccgggcgattgttgtttcacaactcatctatgataaaatgtgagttattgtatataatatatgtatatatgagagcactgtaagcatttgtaatttgctgtatgctgaacgctcatcgcacatgtgcttcaacggaggaaggctgaagtgagggctgcagttcaggattcgttgaaaataaaagtgacatcaacatgcgcacgagaagcgattcctttgaagctcgtttcgagtttcacgcagaaaatacaacgaatcaagaccatgtcccttatctctgaatgcagaatggaactgtatgaggctttgttccgtgattccaaggacgcggtagaccccgggtgacatgccatcacattaaatcggagggttccgaacgcctatacggtacaacctgggttattcgctggatacaacctcgattactcggggttcatgtgcgcgcacacgagcaaaagttccagtaatgtttccagtcaaaaattaagttcttagggccagcgatgcggaagacggctggaacgattggaagttgaattaattatccaaggttaaaattatcggggttgtactgtatttggaattctggggttgtactcagattgaaattgagatgttcgaggctggaatccagatggttgaaatggtcggggttgtgctgtattttttagagtcagcgaagaatgatccgatccggttgggaaagtctcgcaaagatgaagctcgtggcaccggctccatatgagacctcgcaggcccgacgttgacttcgaaaactggggccgagatgtgatccgttgaagttgaagaaaatcagtggagggctttctcaaggaaggttctggaatcagcgaggacgaccctggattgctccgcgacggatctgggattgcccgaaacatgattccaagttggagtcggatccaggaagaactccaaaaaaaatcagaatcggtccgagaattgctcgccgtgatggggacggaagaattctgaggatgatgccaggtcgaagtcaggccggttctggcatgagtctgagatggattcgagagtgctggggaatgatcccgactcagtcaggggttactgtgagagaaggccaaccgtattcttgacaaagtctggccgaagcctgaagttctatctgtgtggatagaaaataaggttcgatcgcctatctccctctcgttcgttcgtcagcgtttgcttcgtcgaaagtccgcgatgacagcgcctcgacccgcttccagtcgagtgtccggactggctaaccacgtcataagctgaggtaacatacggtagtttgtcgcatgtcaatcaagaccttgctccagaatccgcccactgcagaactcggaagcttggaaagttccgtgccctcaaaaatcatgttaaaatgcaaacaaaactcgccacggtgcccatgatgaacgggttcattcttgcttcctccaggcaaccgcgaaatcacaactacttcgggggtgggccgcccttccgacacagcggtgtagagtgacaacagcgatgatgatccccatcgcggagccttcttggccgaacacgaatctcgaagaacgtcgaagtattgggtgcgtgcaaaagttctgagcgcctaacttcgaaagctcataactccgcttccagaatgcgcagaaagatgatgaaacgctcaaaatacgcggaatttcgttctgattcaacgaacggcctgccaacaccgacagtttcagtgaaatgatcgataattagtagattcgattatgaccctctgttttctcttcggtgtcctaaagttcgtcgaaaaaaaagttgtttcaaaaaattaactgagccattcggtcgctgcaaatcggagatatcggccccggaagtttcgattctcagccctctcggtccataatgagtgaataggaaaaatgtgggctttcgcgaaaatgctccatcttccccaaaaaaacgagccaatttgagatgccgcatagcagatcttatagccgggctcaacgctccgaaaatttgtcatctgatccagtctttggctccccacccatagcttcgaattgcgggtcggaatcacaaacttcagtttcgctggctgagccgtcccatggctggcaccggcacggttttccctggaaactctcaaggcctgaaatcggatcatatcgagaatgctaggaatcgaaacttccgaggccgatatctccgcttggcagcggccgaatggcaaatttttttttttgaaccgcctaatttttcgacaaacttcatgattccgaagagaaaaagggggtcttaatcctagcttccccggaatcgaaaactcgcgattttccgattttcgaccatttcagcaaaaccgtcggtgttggcaggccgttcgttgaatcagatcgaatcatctgaaagctgaccaactcccgaatgtattgagtattctatcatctttctgagactcctgggagcggagatgtgagctgtcaaagtttggcgctcagaacttttgcacgaacccaatatcttagctccagcggccaagctggggcttctgttctctcttcattctggctggcgacaactcagaagctccatcgtccattacaagaaagggtcgcgtgacccttcgaagaaatatcacgaccccgccactcaccgttcaaacatcggaatccgacacagcccctggagtcgcttcgtgtcgatgcaaaccgacagcgtttgttgttggtttggctcgccgctactgtgtgtgcttgttccgtccggcgaaagaagcggtagtgaggccttgtgttttcgagagagaccaaatctatcgcccctgatcaatcaagtggaagtgacctgaagttagctcggcgagtaagagtatacagttccgtctccgctgactcattgtcttgaaacgcggacaagaatgagcaagacagcgtcgtctcagcgcggaagtggatggagccgaggtggttcccaggcgcaattccagggaaaatacatggcctcgaatccatcaaatgtgcttagtttcaccctgaaccgcaccgtgaatctgtaagtggtattccgaccattgccggtcgatggaagtggtttgagtgggccgaaaacttcccacgaaactctgcggagtttctgaaacgcgggaaactagacgcgatgaagttcctgaacatgcccgaccgaagttcgagagaacattgcctccccgattgaccggatcccatccgcgaggaagtcgtcgcatgattgagtggacgattatcagaccatccagtgatgtgatcatcgtgggtttgcgatcaggttgcttgcgtttcgtaacaaatcatctgttggctgttacggtctggaactccggccgctggactcgaatgggaccggtttcgtataaatttggtcagttttgatcataggacacgtttcgctctcttcgggggctggaaccatctcggttcgcctctaatatgagaaatcgactcccgtcagctttggtcctccttggccttttacgcgctaaagttctgcactgtgatgtatcttataggacagaactcatctccgtgctggagttgggacctttcgaacgttcaggctccctctcgaatgctttcagcactacgcgtcccttcccgaacaaaaacctcatttagaagccgatcggctctccttcaggtttccgatgacacctcttcattgcggcactacttttccttccagttaccctttgaccaactacacgttcgggaccaaagaagcgctctacgagaaggacccttccgtaccagcgagatttcagcgaatgcgtgaagaattcgagaaaattggaatgcgtcgttctgtagagggcgtgcttttggttcacgagcacggattgccgcatgtactactgctgcagttaggaaccacattcttcaagctgtaggttcaaccttccattgttgaacgaacttctttcgaccgtagtctctcatgcaagccaaattctattgttactgaccaaccatctccacagacctggaggggagctgaacccgggcgaggatgaagtcgatggattgaaaagactcatgtcagaggtaagttcgtcttcctcgatggatttcctcctgatggctatgtgagaggaatcagccgaacccgtccttgagctgagaacatttcttcctcagacgctcggtagacaggacggggtgaaacaagagtggacgattgaggacacagtcggtaactggtggaggccaaacttcgagcctgctcaatatccctacatcttgccgcatatcacgaaaccgaaggaacacaagcgactatttctggtgcagttgcccgagaaaggtattttaaagcttaccgtacagcgcgtggacacatttatccactcacacctcattgcatcgctcggagttttcgtatcgagatcacctctagctgactcgacgcgctcgcgcgtataatatatcagctgtgagatttcaaaaaacgtcgctgagatagggagaactctctccacatagtaaaacgtcatccaaggttccgatcctcaaagtgcttcagttccacgatctgactatatttcttttgacagtcctgtgaaatcttctggactccgcgtgctagaatggggctcgaatcgaatatcaacaagaatatctcgacgtcttgctgggaccgtttttattagtgcggcaagcttccgtctacttaagcgattttcgcttctgcctcccataactgcacgtcgttcacaaattgtagacaacgcaagaagattgtttcgtgcgccttccaccatttcatgttctcctgtagctcttcttcctcacgctcgtgtgtttccttctctctatgacttagaattcttgaggagaattccgcaagataatgtgttcgaaaccacaagatgtggttctaaaacgcatttgaggagcagagctctgagcttttccgtgatcatttctcttttttgaagtcgttctccgtctgagcttgacaagatcttcctgctatcttgtctcttttttgttaccgaaaccatgaggttggagtgtataaattgttcttccgatgtatcgaacaccgccataatttggcagacattgacacaggagccctctatgttactccgtcatttgtggacaaacctaaaacttaccactgaccttgcctggtctgctgggcgttgcgaagcaacagtttcgttaacggcgtcgctgtcaggcaacctcactctaaacggctcatggaatatcggagcctgggtctgtatgcatcccatttcttctggtaaacagagattcgactgagttcgcaaaccgtcgacctgatttcaatcggtccggcccgaaggcccgttcataagagtcagtgagtttctgcaggagaacggcaatgcgtgagtgcggtatctgagcatgtgctccgtgtcggttttctctgtcttgaaattcattcagcgagacccgtttcgagtgaggatgccgcttcgaaactgcttctgtgatggtcactgactgttctctcgtgatctatgtcccccgaatcagacccctgccggtagagtctcttcaatatgtgttcgaccacggagagactcccctgttcgagatatgttataattcggactcgcgcggaccaaccaagagtgttggacagcggtggacgctgaatgatcccgccgtcggatcccaaaacctaagttcgattcctccgagttgctatgtatacatcgcatcagccagagggggatcacgagcgacttcatccctcacataacttatgtatgcattctgtgatatctttatatgaggaaatcagtcagtgtgtgaaattgatatgggcagtaaacgggtcgatgaatacggagcatccccggacagtcaagctgatagttgacgtgattcctggatcctatgtgttgcagttttttgtatggcgaaatgtttaggacgatattattgcggcgaggtagcttagggtttggagttgtaatatgaatcaccaaagtggcatctggatcgccgaagcgccatcatacgagaatgttgaacaatagatctcgagacggcaactttcggtattggctccaaatgtcagctgcagatatgtgtgtcgtatgtcatcgtattaacaaaatatcgtatgaatccattgactagcgaaatcgtgctggagagtcagagtaagttgtatcgttgatggcctgtgtaacgaaatgaaaccatgattaaggaaacccttcttcccctctcgttgcagcattgttcgcagtacccaagaattataaactagtagctgctccgcttttcgagctctacgacaactcccaaggatatggcccgattatatcgtccctgccacaaacactgagcaggtaagttgcgcacctttctcgaattcgcggactgaatcggaattccgctttctctacaaacgggtttatcatatgcgcctcttttccaggttcaacttcatctacttgtgaactgggatcgtggagctgtaacgaccgcttatctcatctggatcaagttcatccggaggctcagaaggttcgttgaggttaacagaagtccgaagcaaaaggcttagcatcatgtctgtattccccatattctgtatataatacgcgcggctatgattgcacataatggagaaatcatgcccgcggagcaaacttcaataaacactaggagttcttcgaagctcaaagcttgggaatctcactcggaataccctttgatcccagcgcaacagaatgtttccagaatcgtcggggatcccgcaagaatgttttccctcaaattgagatggctcgcgaattttcaacaggcggcgcagctgagttcgctcggtgttgtgtggaagggtgtccatctgacaaaaagaccggcgttaccagcatctcgacgaagaagttgtttgaagcccgaaaatgtagtcgcatggatgagctacattttgcaaaaatgatccccgaaatccgtctcctcgaatcgccagcaagctcaatcacagcaatcaggtgattctgagcggaaaaaatacatggttcctgttttgtcatcgtcaccagcggacaccgagctctgaataatagtcgagaaagaatgacgaagatgaaattcccgatctgatttgaccaccctgtacatagggtaagatgacggcatctccccccaactgacttgggaacggatccccttgagtcgaagtgactcacagagagcatagatgagtctcaaccagccctccggaactcgaagtggttcattgggcagaggaaccgttatggaatcagagtgcatcaaaaaactcagccagttgtgccgtgccccagcaaaggccaaccgctgggcgtgagccaatatttggaaagactggtggggatgatcagccgacatctcttcgactgcgcatgcaaccagcacggaccataacgaattattactccaacgattccgcgtaggcggcccagcagctaaattggtatggggtcagaagttctgtctgagaatgcatcgtcgattttgccgatctggaagctcatcgaagtccaaagcaagttatcctcacagaacatgagtgaccatcatcggggaaacagtccttgcagtgatcctcgcgagtaatgttgttaggtacagtgggtcgttgtccgcgcgagggcgatcgcgcgatgtgttttcattctgccactagtcaaattgttccagaatggggcctatcccaggcccttctccgaaaaaaaattgcgcctggaggggcatcaggttgacgctccgttacgggcatgacagggggtcattcaccgtgctggtggtcggtataccatgtcggcatggaatgctggtggtcggtataccatgtcggcatggaatgctggtggtcggtattccatgtcggcatggaatgctggtggtcggtataccatgtcggcacggaatgctggtggtcggtataccatgtcggcacggaatgctggtggtcggtataccatgtcggcatggaatgctggtggtcgtacaacttcgacggatgcgtgtccggattacgtcctctcgagaactcctgctccctcgtggtagttttctcgcttcggcaggaaaccggttcgctcggaaagagccctgcagatcatgcatttgctaagttagcaatcgcgggttcgatccccggccgacagcaaaaatttcttatgtggtaaaaagaggatttaattcgtatcagaattaaatctgaaccatcttaagacccaagcccactgcccggaatgggatttgcgaggcgatggggagtgttcctgaagcaataccgagaggtgatcccgggacacttctgagggctggctgagaggtccagccggaaaacaaaggatcatgcatttgctgcggggtgtttggttgtgatagctggaatatctccaagcggaggattgctagaatcgtcttgatgcttggtcggggatgccatgaacttggtgattccctcgaaggatgtgtcgctccgctgatcagttttcgatggatttctctcctatagggagctcagaatttcgctcgactcaaccggataacggagatgcagcaggctttcagaatggaaaagctcaccaagtgttttcgtgagattgatcactgatcttgacagacggtgtgttgtttaagcgatttctgtcgtcggatggccctttgggcctatccggccaagtttcactcaactcaaataccttatgcccacgagctaatcgccttcccaaggtggaatccccgccatttcgccggctgtcaatcgccatactcgccatcgagacagaaactctgcaggcgagagggaatttgggaacgaaatcgacttccaatgtcgtcccacttcagccccatattcacgtactgaagaacgaagagccgttcgggtatgctcctagcgaggcccaacatttttttatggtaggattcattcgtttcaatatacagagaaaaactcacttcttccaatccctgcattttctaggtccagtcttctcttgagatccacaagggatgaacaggaaatagcgaccctcctctctaacatgaatatggatccgccccttgatacgtcataactcggaatcgaaatccaggagtcaatatttctatggaaacgtaggactgggaatcttagagaggaatcatcgtctctggtggttcaatcgtcgacgaagtattttttttcggagcatcagccgatcaggctgatccatgagctgtacgagtatgtacagctcatggaagcaggaaactcattgtgaaaatagagcggaatgatccaaagcaggggcagcgccggacgcatcgtggaacagccgtctgtgtcaggaacaggaccagtgtcagtatcagcggtcacggaaaccaatttttagatccaatttaagtccttcaaaagccggcaacgagagcagcgagactatcattaatatgaacccaataagccagtaggtcagaatcgtcgaacttaaaattgatcatgatcctgacgcaacagacgtttcagagtgtttttttttccaatttccaaatcagcggaacccaaggggaggaaggccatagcggtccgtggctcaaaacgtacgttggaagtcctcctatgctggtatgcagttcggagattaccgtgtaccgcctgatgcgatccgccgcttgccgaatcacggcaatagattttcggggaaagaaagtattctcggagggaagttcgacgctcaaaataagatcatctcggcctccatgatgaggaagcctccaaattagactttccggtggttgagaagtaacagagccgaacagaggagagcggacgaaaaccctcaaaaggcatccgtcgccctccccctcgccatgtcaacccagttattcgttcgtacgagcacgagaaatttgagtgaagttctgcctgtatattccggtggcttctcggttcgaggtttcgtggcagttccgagtttcagcgtgcatgtcacgtagttatgccgtctccaactggtcgatgcccccattcaccctgggttgcgcgtctcaagacttctttgcggagcatgtcaagctctttggaaaccttcttcaacagtgagttgttctcgactgctctccttgagagatacggcatcaccttggaagaaggacaaacgtttttttgttaaatggagcgaagcattgttgcgtgtctctgcgaagcaagaggaagtttcggaagaggtggacacaacaatcaacactgcgatacgaacctcatctattggtccataaggcacgtatttgtaaaccgaatatccagcctgacctgcaagcggcagtgaggatctcatattcagtctgatttaggagttcaagtctctgttcgatgagcgatgcggtctcacactggtcacctcgaaatgaggtcttgctggctgaacagttctgtatcaaacagtgatattctacgaccaggatgtgaccagttctaacacggatttttctcatgtggaactgagacttacccaaaggaaaactgacttggtcacacatccccagcagctgaccgaaacaaatgagtctctcaccccggccaattccgagttctttcattcgtcgcacaatgtaccggatagtgttttcgttgtgggttgcacacataacagaaattgtgccagatttcccggatgcgacgatttcttgcagaacgtagtctagtacctggaacgatactcatcacattcaatcgcttcataccgcggaactcggtatctatgatcggggttgcccgcaagacgcgatgcttcactccgggccgttggaaatcagaatcatcgatttcgaccgatgcgacggctccgtctgaacgtttcttgccacactcactttctgatacatctggttcgtagcctcatatgactcgtttatgggatcaggatatcccactgtaattgcccgaaggcgttcctgttccatgtaggcccccctcactatcttcgcggcgaagcaaaagttttgacgtttggacaactcaacgtcacgttgtacgtgatcgaaagactccttcaggtagcactgatacgtgttgaatatgatgggctggaatgtggagtcgcagtactgatcgagctcaggtaagttccagcggcatgaatcgtgagataatctgatatacacttattgaagtataggggacatttccaaggacaacatccgcatcatctgattgcggtcgggaacggtgttctagtcggttctctctccgaggggagggattccccgagagacgccaagactcggtcatcatcgatcgtaacaaggagggtctctattggcgaagagaaggaggtcctcgaccagatgtgaccggggaaattcacccgcaaagcaacccaggaccaggagaagtgaacgaattaccagcagacaggctcaccttcgttttattgtatttcctcataagctcaacggtcagacggcttatggctggttggaagtaagtctgctcagcatccaccataactcggactcccgttgattctgcatgccttgcgatcgtatggacgcgacgcatcatgttcctgaaatggaagcacacgtcagaactcaatcacgatcagacctgatttccttcatacgcaaaacatggataatacggagaacaccccgtagtttgacgcatggactcataaaatattacggattgtcttccgtatagcggcgaatgggaactgatcacgactgaattatcaaaacggtcctcgaatgaatcacctcgaccaaaatctcgcttctcaacccacctaaacatttcctcctcttcttcggtcaaggctgagattatcggttccatttttcctgtttgaagattcgggactttgaaaatgtctgaaatcatacctcgcgtgtccacgagtccgctccacgagaacaaattcatcaagctgcggaatgaagatcaatcggttgggcttgattgcaggaacaacgagaattttccggatttttcaatgactctacggataggttcattcggacggatagattttcgagattccgcttggaacgccgctctcaccccttcttgtcatattccatgcccgacaggaatttcttgtagtcttcttgatccttgtcgatgtgaagacgctgctcgatctgctcaggtgttacctgctcgagcgccatcagtttgtctttgcccgtcacgtctctgaacagtttacgggtatgtatgatcacttctgacagttgcatcttgaagaagagaacatcgtattccgaagtgttcccagttgtttcatggcgaaaaaatgttcacccattcggagctcaagcacagaagtgggtccgtcgatgggaactgagatcgaaaccgcaactcaccaacaactgtggtctaccgagagccgttagttttatggcagcgagtcctgttctttgcgtcgtatcagcaacggcgtcgatcgatttgagaaatatttctacattcttttcacattgtgcttcgttaagataaaagtaggttcttgcggttggttgatatcttctacgatcagcgaaactcttctgcggttggaactgggccagtttgccactggcgtcacctttcgcggaagaaatttcctcatccgacgaggcttgctcggcagagccagctttcgagctcgtagatgccatttccagatccgccgccttctcctcgctggaacgaagtttggaattcatagatcaaacgaacttccgtcattgatgcctcgctcttgactaccaacatcctgcgggactcgcctgagatcctcctctgcgctgtaatcgaggatacttttgacgccgaatctgcgaagacgatccacagtgggcttgatagaactttcggattcgcctgaggagtttcgaatctctcgtgagctacgagattcttcagcagaaatataggttttcaataattttgacatcggtaggcggagacgcaactcaccaccgacgaaatgcccgtagaatgttctcctcatgagcgcgtgaaatagtttcttccccaagaatttttgtcccaatgacatgagctggaacgaattatctcatgacacaatttcatgggctctcgcggagctcaaccgacccgttgctcgaactgattttcagcatcggggaagtgaggagcccgaccaaggctgtgttcgcacggcttctaatttgggtccgacccaacaacctcctcttcctcctgagtaactatctttagaaaattccctcgcggtaacccttgcgcgtcgaattcagagttcacttcatcccagtagttccgacaagaagaaagagagctaagcaagttatcgtcgatacactccgagaactcatcgagcctgagctgttcaagtgatcattccccgtgagcgtatcagtgtatgtagcggaagtaccgaattcactcaactacctcgagtgaagcatgcgggcggcactacgtattcccgactcgaagacctcgagatcttcaaaatggccgattgcctcctcgggaaggaaatgggccaggagcactgcattgagctccgagtcgaacgtctgagtcatcgcgcgctctgatttggattcgtggagtaggtttgtccgatttcacgtacatgactcataacaatacgctgaacactgctgtcgagcgttcggtctcttacttctcccgcagacgacgaagagaaacgacagaactcgttgaccgaaataagtgcgtggagagttgaagaattcatggccgtcagtgacgactgctccgatactttactgctccgcagcttccgcggtaagtttccacgttgatcaacatttcagggttgcgcaacctgtcaatatcaatccttgcgccgtctcgaatctccatgatgtatttcgagtaccctaatctatcgatgccgaattacgagaaaatcacagatgaaccacggggttttgaaggctggttgctctatgagagctcagtcttatttatgagtgcgccatctttttttactccttccccatctcattcatatacttttaaatgaactcgtcatatcgtgacacacgaataccaaggtactgattcatcatgttccacagaaggggatatgtctgggaccaccgactatttggtggcgttcagcgctcactacgagcactacgttacatttcaggcttgctcgtctgaaggcctgaaatttccgaattgcatttaacacagcgttcctcgatggaaatctgacacggccgacggagaagtcatgagttcgcgcggatgccatctctagattatgcttgctccatcgcgatatttccgtgggccatggtccaaattcgtggtcctagcaggtttctgtgccggaatgatttatgtctccagttgcagccaaggctcaggcctttcgcgaagtgatcctcccaccatcaaaggtaacacgagcggattctgagattgataatcccgaaggggctcgtggaagcactgtgaaactcggtatcatacggagtgggactccgtattccgcacgagtgaatacgaaactcattatttcagaagcacatacgataacaagtcaacaagagcatcggcgcattatcgctcgtcggggctgcctcgagattgcgaataagcgaggagacacgaatcgcgggctcaacacccagcatctgattgttgacgataatctcaagatcatttattgctacgtcccgaaggttagtgaataacggaccctgtagggatccaagtcagcaggctaaaattctgaacggctctggttcacatggatttcaggccgcctccaccaactggaagcgagtgttactgtctctgcgggaccctcgtcaaactcccctctcgatccagccggacgtcggccataaacgtgaatgggaggtgatagccaatcttgaggacaaaagacttacggatcgtaactatttcaaattcctagttgtcaggtgcgtggaagaactggacagaaagcacaacctcattcctgtgtcctttgctgcgaaagtatcccaggggaacaagtcccgagatctgaaggttcttattcgaagcgaggctccgttcctgttttcaggaaccctttcgaacgactcctgtcagcttacaggaataaattcgaactcgcatacagtgactatttccgcggccgctacggcaggagtatgaagtaccaccacgaaaagagacgattctctccggacgcttctcgagatgatggcattccaagtttcttggattttctgtcctacgtttcctcggataacagtgagaaaaacgagcactggcagagcgtgtatgacatttgccacccatgtgatatcatgttcgacttcatcgggtacgctcaaaagtcggagtccaccgttcgctctttgcgagaaaagcagaatgttgtgatactcaattgaaatgttagaattctcttccgaatgaagttccaacttcaggaaatacgagacactgcagcgagattctgacttcatcgtggaccatatatcatcatcgggaaagatcgatcgggattggagcttcccgtcgcgggaggagacctacacgaggaaacagccgacgcgagagctgatggaattgtgaggggtttcaagattaaggggtgcggtagtatgacatggctctggtggatgtcagagctttactagcttccggagctcccactcgatgtactcgtcgtacgtcgcggtagatgtggacaacttattttgagtttccagttacatatttcgcggaacgatcaacccttcctccttccatagtggattgattcgttatagtcatgtattccgacattccaggtattacagatcgattcccgaggcattacgtgacaagctctcgaaatctttcgaggaagatatctcgttgttcggttattcgaggctctctctgagggaatcgtcggagaaaaatactccgtccaattcatcagagtccgataagcgaatccgacctatgattatggcgaaacaaagacaaaattagaccggtagatcaggaccgagtcccgctgggattctcagcaactttgctcaactgatcgaagttgtgatcggattggagaacgtcagtaaacaccgaccaactctacggcaggcataattcccaaggcgagtccctctctggatttcgccaagtcaaataccacttcgaactcagctcgcggtaacgtctgcatcggaggcgatcatgaggtcttggaatcgatccaaaaacaaactgtcgctggaagcatcatgtgtaaaataaatgggcgaactcacagaactccgttcatcacggatgggtgtttgtaggaagcgatcgtctccaagacttagcgtatcctgaccaacgtataatccgtcgtcgcgaactatactttcgttgccgcgacaatttagccaaaacatgtgaactcatagaggagacagaagtgaaatgaaacatcagatttttggtgtcggatgctaactggtcagccctgaccttgaccatcaacggtgattcctcggctggagctggattctgagcaacagccaaaagcatctcagagaactcgaataggttcactcggtagagaaggttccaacgtaaattcttgtacgatttcaccaacgctaactgcgtcgaaggctagcagaaaacatgaatgcggctcgagatggttcggccttggagtccgccctactgacacagtgaatgtgacgtcaatgatggctggcttctcctatcggtttggaaagcagtatgtctgctgcagacgcagcccgaatggcacctccatattgacgaattattatattggaacgttcacagatgttctgggtattcggaaggaacacctcgacacgatatttcacgctgagtcagcattgacttggttcgtgatctcttggctggcacactcacctggcgattgtggttgacaacatagtctatagaggagagtttcaacactaggtaagctctgagcagctcggatgtggtcttagatttgaatgcttccttgccatcttcaaatttcagatcaacctctagcttctgagccgttgaagaacttaacctgaagtttgttctgagcaaggagttcccggaaaaaagttccagatgggaacgaaaggctgccgcgcgcctcatggatacccctgcgcgcaacatcacttccacggaagtcctccgaagccgtccagtgaacggaggacggcctgtagtgctaagcgacggaaaacggaacctgcaggatcagttcgagtcgtcgtaaaagctggactggatgttttttttttgtcctcgaggactcttagtctacggctgctcacgtgaatgagccgattcggctaaaagtccgacattcgacggctacctcgatcttctccaatcctacggggccagttcgcctctgttccgaactttaggccgaatcagctgctcgggaaaccatgtgccgctgcgatcacatcagctggtgagagcgaccaatcccgtgctttctccagagtggcaaccggagccggctgaccagttaagctcgggagcttgcaaaggttgggcacgattcgtcatcgttcgaatcccggtggacgttcgggaagagaccggtcgctcggagatgatgtatggaatcttgaactcggagcgttaaggcatatattttcttttggacccaacttcggaactcagatccgaataccccttcctgataaaactattggttggaagtgctcaaagtcggcagatggcagaccttgaagaactcctcgctgtccctgtccacagtctgggcacgcgaagcattgatctcctaacatcaggtctccaattgcaacaagttattccaggtaatcctttgagaaatcacatcgaaccaatgtcgtaaatggatttagacctgatgtcagacaacggccccaaactcgaacgtattaccccgaataccttttctgagaatgacccatcatctcgttgacggtcctgccggacgaaaacttcttatcttatctcttgtcgttctggaatgtttcgctacacaacctggttacatgctcgcgcccgaccgatttttgaatcgcccatcagggtgtcgtggtaaaattacaaaccgaaattctgttgcgcgccactcgatgttcggagagctcggatttcggccgtgccttgcttttgcatcataagagataccactatgcagtttccctcaaatcggcgggcgggttccggaacgcttgccccgccggattgagaccggcgactgacttctcgactccgctggagtttcttctcttccaggcagagggggatactctcgtgattggcgagtgctggcgcagctcgtgcttccccacgacactctagccttgctcttaatgtccaatgaacccgtcagagagacattaaagttatggcccaaagaggctacggttggtgagtccggagatgcctttcttgaaaactcatcccagtcatggatgcgagtcatccaggtcctcaagaagtcgaatcattccaggtcaactcgtgtccgccttggaaggcgtcgagcgtttcgacgttctcgacgactgcttagattccattctggacgattgtagagatttcattcgcagacgagattattgggagaaggacccatcaataattcaagcgacgacatttcaagcttttgttatacacgtcctcgaagatgtcggtaggttctgcttcaacaacgagtggttgcgacgaatttagctttcgtaggtcatgacaacggcttctgtcaatgggttttccgattttcaacccgaggctcgagaagtctccgagcttcattcgcgctcttcccatgggtcgaagaatctaccgctgcgatcgattcccagcgttcatcctcgatcgtacaggagggagcgagagaattgttcacttaataacatcatgtttcctctagagttcgttcggaggatggtcacgagggttgaagatgccggcctttcgttgtttgtgccggcacgtgatttcccagcggcggagcgtaactatgtgtactcgctcattgaggtatattgggtgacttttccgtggtggtatcgagatgcttgcgtttcggcacgatgtttcgaatgcgccaagttccccgtgtttcgttgcagataatgcagacgcgatgtttgaaagtgatcgtggtgatttcgcaagccctcgcaaacgatgcggaagcgaggactcttctagagaacgcagaacggatccacgctcaggaagcacaacggaaactcatccctataatcctggaaccgtgttcacatgttggcttcatgatttcttccatctccaagatacgcttcgacatcaaaaaagccgaaagctggcaatggcctaggctcatggaggcgttgcgaaagacgacctaggtcagcaattcctaccaagcccaaaatcatctcatagtttcgagatatcaaggtgattcacacatttacgtttcatcgctcacatccaggattgcaccaggaccgaccagagcctaggatcacgcaatgacttcgcatgacccggaccgcgtgaatgaattcatggtgcaactgtctcggtccaaggaactcgaggagagaagctaacccagaacgctccggtgttgtccagggcatgagactcgagtcgcgtagtactcgagcgatcacacctggcattggaagggcatggcgagcgaagagtatgggtcgaacatcagagaaactcatcgggccaaatccgttccacattttctctgctcgtccgattcaagcgtgtctcctttcgttccgtattcgccatcattatcatgcgagccgcgggaacgtcagttgcggaaagaggtgcgaaagcgctcgatgccccgatcatcatagcaacgcactccatacatcatccaccgttcatacctgcatcatgccgttcgctatccaagaatgttcgacgggctcaaagttgatatgttgaataaaaaccgacgaatttgccggtactttgcgcaacgaggcgcctcatcgctgccggaaggatactttgactgaaccgcggtcgatttcgcagagggcccaagatctggtatcgtgtgaatttttcgagttcgcgttgtatctctgcgctgatggctgcatctttgcgggttatgacgcgcgactcgaacagattctgagaggacccggtccgttcagacttgacgatttgcgagcctttcggagttaggggtcgaaaatgcgtgaagatccggtggggaagatgcgtctttcagagatctgtcgaacaggaaaacaatgagaaccactggtggctgagttttggccgaaacaaccatggtcgtggttcagctctcagctatgaccctgtataagctctttgccgttcagaagacaggttgcttcagaggtttcctcctgaatttcttgagattgctgagccaatgtattctttgatttatcgtccgaagcgatcttgcgctggtatattcacaaatatatctgagcttcgtggacaggcccagcagaacgctgatgaaactgggatctaagtagagtcgagctgagccgattcgtatttgaacgccgggctacctgatgtttttgtggagtcagcctcaagtataagtcagagcggagtcaggaataacatcgctttccaacaccggggatgcaggtctcaaactctccgtcactccacccttctcgaactgagtcctcaggatgtgctacaaaggtcacgaattagtttggacagcgctgcaaaaacagggtttcgccggttagcggccccagaaaatgttctccaatgtgaccagaattcgacatttccagtcccatgatgacatatgtcgaagaaggaaccatttaaacacatcttttgtgacactctcttcgtcgccagagacgaagaggctgatgctgacgattgaagtgactgcatcgtcaagctcctgaataaagagcacaaactcagccgcggccaccagaggcatctgttcccttctcgagccgttatatttgctattatatacatatgatagtttcccacttcaacgcgttccatgggagctatcatcaacgtggattatttgaactattctttcgtgaaattcggtaaatcggagatctctgttcagtctttcggtgattgaacgtaaaactcctctccgatttccgataaatttgttgcattcgattggtcttagagcaaactcacattcagctcttggttcagatggacactgagacatcaccatcttgccatatgtttagagttcatcgattttgaaggtatttgacgaccgcgattcaatccgtcaggtagcccatcagggagctcattccttgatctttccgaatatagctcgatccgcgctcttggctctcttgccgagatttgagcgtccgaagttgtcgagctcggctcgaattcgagaagagtggcaggggctcctagttgcatgtcacccggcgtggccctcaatcgtgtcattgacttcaggggcttgaacaatacagaaaagacgattattaacgagatcgatccttgacaaacccgattgttacgatggttgtgtctacgtgccagcccagccttagcgggaaacgtgcaatcgcatattctggatcgatgtcgtgcaagctgtagtcttcctctagggaatctccgctgcgagcagctctattcgcatcgtaaccttggtggtgcaggcgaagattcctcaacgcgatgttcagatcaaggaagcatcaaggaattttcggaataatattttccgctttgctgaaagatctcctaacttcttaactcggcttactgggggcaccgatcctgaggctcgacacgctactgttgccgctcattcatacggcttgacgtcatgtacctcctgcgtcagacattacgcctgccacggcgatacagagaacgcttgtgatcagtgaggcgtcgtcagtcaatcatccaaatgcgatcggtatatctcctagttcgagtcaagcaactcggacaagtgttgacctctcaacttcaagtcttcagtaaaagaggggggtcgtgggagtttgaagggggaagcgttcagcccggacgagagcgctgaagaacgatcggcattcggatgataatcgcgaaggattcaaacatctagaaaggatactgtgacgcgatcgagtcacatccctgtgctctgatctccgcatcgaatctgcacgaatcgccgggatgcgatgagctcggcgagctcgaaatccatccgactcgggacagtcctggaatttagaattcctatttcgaatgccgatatcaggaatcatctgacccaacacacgctcgggagttcgagcatactcatatgagttacaagtaatgattatgatgacactgaatcgtttgagttctcaaacatctaacgtaaactctatatttcttctctttcttcgacatattgtgaacacagaaacagacgtcatcctcatgaattatttacactgagtggatagatggaagttgttcaatgtacgttgtacattgcgcgtatcaaatagatctctgcccgggtcacggtgcgacttccattccgaagttttctatgcattcagaatttgggctcccttcaactccttgctcttcgacgggcgtcaatcgttggacgaaccgtaacagacagtgaccatctgcaatccgatattccggatcccgctaatttcatggctcgatcaggttccttgtcgcaccgattccttcacacaataaatagtgctcgatgaggtgatgattcagagcttgaagaatctcaacgccttggccactttggggaccgctgattgcgataaactcgtgttcggagtcgagctcttgctgaagactgagtgattcgggtcaatcccatcgaaatatctgtccagggccaccgaaccgatctgcgcggcttgagaacgcttcacgacgtagtgttgacgcgaggcctccgtgtttggcgtcgggtttatccatctggggagagagaaacaaacatttgaaatcacaggcccgatgggtcgaggattacgcttcagagacgccgagagttctgccaagctaagatacgcgggcagaattttttgcgcgtcggagagctgactccctctccaacactgacacgaattgtcaaaagaggaagctgcatcgaagttcagccatgtcataggcacactcttcaagagtcaggccctgctggcagcatagatgtactgcgcggacggccacccgccacagagctcggaacgcaggtaacacagaagcacccagcgccgcaaagtatcgaaatatggtggatcgaacacccgggactgaacattgattcaaataggcaaacgccgcgtggccgaagccggcgcttccgaggagccagttgggaacacttgacgcctccaacagctgattcatccgaggtgcgcacgatcggcaccatgaactcatattaaacggccatctccgagggccttacgcagttttcgtcgactccacgcagaagcctcccgggaccccggctccgaacagctcaatggattctctccttcgagcattagaggagatcacgcggtacgcatctgaccggctaatcaggaccagccccacgttcatacctcgatgtggttgtctccttcttctttgagaggtcagtcacgaaagttgtggacgacattttgagttgattgtcacttcgagaacgtttcccctctatgactgctccgagttaccggcttctctactcttatgcgtcccctcttatggaaagggcaaatcgcgccaccgtggtctgactgatcgcaacgccactgccgtcagaaaccctcaactaagcatcgataccccaactgtgggcacatctggctcggattccactcaaacgcagagccggtctcggaattaggattcagaaattttcctgcacatacctgtcttgagcgacggttttggagactcgaggtctgacagtgaaacccattgcttcggaaatggccatcttgcttgctggattttggtggttgattcgagccgcgagagttttttttaaagctcgcgaaagctgagcgccgctccagggatgaaattcgatgcgagcccgcttctcttaagtaccgtcaagccgtcccaaacggagagaaggtgactcgcaatcattgacgtcgccgctagggggcctagttttaggcctgatagttgctgtttgtcctgagtagggaacggtcggcgaaggagccgccaagcatggaaacaggctctttctggagcgggatcggcaaatcgtcgaaaaacatgtttggatatttgagacagccttgggccggcgcagatcgcgggcagagccacgagagatttcgacctgatggccgtttggctgatgtcatgcacggccgtctttcgaagaattagactcgcttgcaccaactcggacatgggcggtgaccggtgaaccgagcaataaacttcctcggtcgctcttgctcgaaaatgcaaaaagctgccaagcggccaagaaggtcaaagatatgaacgagcacggaatccacccaagacatgaacctcgacctttactggaaccgatgagacccgttgtccgaatgagaggtgatctccggaaatattaccgcccctgaaccgttcaactctcccttggaaccggcgaggattcaacgttcaaaagtgaataaccgtgctctgtgtaacagtctgtactttccagtcgcttgccatcggactggaattggcagcgagccagaagatgctccgaagaaacccgatcgtcggatacccatgcgagtcatcatgacgattcctgatgcagccgaacgcgctcgtgaggcttcatctgttgcccagacagcttttgtgcggccctccgttcggaagactttggagctggggtttcctaaaagaagctccgagtgcgatcttattcgagatagcgggatcctgtctcacattctatgctgctcattttctaacaatagaaaccacgagtacgatggattcgcagaacatcgatgggacgattctccaggtcactctttcctcataatgccgagcttctggcctcgagtcgaatgacagccgacgtaagacagcctcttttgggaaactccagcggcttgcctcgttggacagttcagacgtcatcgattgctcatttgttcatgatgattcgttcttcgaggccccaacatcaaatcaattcatgaagaaagccaggcggcgttgtatcgccccgatgaggcactcaattaattgagagccccccgctcgctggccgggtggcataaaccaacactgggtgccacgctaagctagcaattgcgggacataaatctttcttatgtggtaaaaagaggattcaatttatatcagaattgaatctgaaccatcttaagacccaagcccaccgcccgcaatgggatttgcgaggnnnnnnnnnnnnnnnnnnnnnnnnnnnnnnnnnnnnnnnnnnnnnnnnnnnnnnaaaacaaaaaaaaaattaattgagagcgggtcgatctcgggctccagcaatgaatggagactccactgaagacgtcagcgaaggcatctgcgtgcaaccggaagatatcgaaggtgaccgaacattcctggagcacacgctgacagctcataagccaaggcaaagtcgaagaggagcactgcaagattctccagagtgtgtcctaaggaaacaacccttgaacgacatcggattttgaacagattggatgaggatcggtagttggctcctcacatggagtgccgagtgtagtctcggagtcagctccaatcgaacgaagcattgccgctgctcaatgtttcgaacttcccgaacccacacatggctcaaaacgagctcctgtgtcgattgtttggcctgaaatcttggccactacttggaggacgttttggacattgaaggtttattcggcgatagaaaaagtgaaaatggtggggaaataccccgcattcaaacattccagcacaggaggcgtgcagcctattagcatcgaggtaggagtgcgcataggactagcagtcctttgaaaaactgccgatcccaaccctggtctcttttcccacatagaactcgcccttcagctgttctttcctaacgacttctttcttttggtcgatcgtcagctcgattcagtgcgacatctcaaaccactaaacggcgagcgcatgctccctgtgctaggtagaggaatccggtcctcggactcctttttcccgtttcgctgctgagttggagagtcaaccccttgcgaagtagaaataaggctcctataatccatgagagcgttcaaaccgcacgcatttccagggtcggttctatgaacctcgagctcgtctgtctccggaattcaccgacgccgaccgcgcgtggaggaaacaatggctgaaggatcaggtgagtacatcgtctggacttgaatcttcctcatccgagcggagaattcgattctccgagagtttccatcagtcgaacgtcggcggtctcgttgcgcaaaggaggttccccggacgagagcacttcccttcgagaacctcctggaatactgccgaaaagtatactgtgggagctcgggctggattaaccaacggcacaccgtgtggacgaccttgtgacaggattgcgaccataggctaatcgtattccctggttcgaacaggtcatcgcccacgacgaacctaggctcgttcccgaacactattacggcaccaagaacgtggtccgaaggttttatcgtgcacccttcgacgccttcgaaaaggcactccttcctaaagtcggtgcggaaaacgccggactaatccgtcggatcatcccaaaaaccttgcttgcctactgcttcgtcgtatggaccacctacatgatcaaatacagttcggtgagtggcgctggagataatatgcaaagtccctcgatggagaggaactgtgccaggggaagtctgacaacatgcctgatgtctattcggtcgaaaaacggaaattccggctccgccgaggaacccttgtgtgaactccgattcgggacctggggcgaaatcggaagtcacatttgtagatgatcgagcagttagctgaccctgaaagttcattgcgcagatttttcaaccgaacaccgctccatgtggagtcgcgagggattgtgaaagtgaattcatgaatgggtgattagaatcgctctatcgagcaattggaactcgagaggccttcagcgacgcggtacccctttcttgatagaagcacagagtcagatcgaggcgatcgagggaccttgactcgtgtttcatgaccccttgaaccgacagattttcctgtcgtgtttgttctcatagtcagaatatgcttgaacacgaatctggcggaagggcgagcttgacacaatgcccacggagacgctcgactcactcctgagaataacgacatcgtatcgcggacggcaaacgaggagcttattcccaatgctatcgctgagctcgcgggactcgcatagcggcggtgctcttgtaatcggcgtcttatctctcgccaccggcgttcaatccatagaaatacaatgttccggcacactctatatttagaacagtcatgacgccctgaatggatatgcacgcgctctgtttatctcgctcgtgattactttgacttcttgaaggattgttgatgagagagcaccacgagcacgctcgaattttccctgcgagcaacatattgttgtaattcaagatgcaggttgttgacaatgtttcctgcaataggatcccgaggcttgagacatactttcggactccaggtcattttgggtacatactggctgcgagactcgaaatttgtggagctcgaaccgctccccactggttcgttcacatggtatcactctcccgctctcttcctgcacactgatttgtgtacgagcgtgcccaagaacactggagagctgagacgaactttcatgttttcgaaagaacgatcccgttgcgctcctgattggaaaactgtagtagtcaccgccttcgcccgattagcgatcatttgggttctggacgccgcgaattctcttatttggccctcgacagctgccggacgatcaattcagagaactcgaaagcagagaacattttcgaaaggtctccctgacggtgagttatgtggacggatacatgttgcgccgcagaaagcactgataggcccgaacgaatcatctccggtgtctgcgcgggggcagttgctcgccccatgattcgagagcttttcatttatggaacagtcttcgatatttcggatattggtattcccaggcgttaccggatgaacttcccgatgagctttcagctctcgtccgctcagtttgtgccatagaagatacactagcttcgtttttccaccggattcctcccatagcccaccgtgatgagtcaatgatatgttccttccttcgatgaaagatcagaaaacgctcatcgcagaaccagagatctcagagcggttcgaaatcgctgagctccccaaggcaccgtgaaaacgctaagaaattaaccgatgtgcgtcgagtttcaagatccagtgattacctccacagaatatgcgcgagaatcaggtctttcgataagcaaacaacgcagcgagcgactgcacaacaaacaagctcttgtgtgaatctgtatcacgcgcttcctgactataggattcaagagccccgaatttatacgaacgacggatcttgttctccgaggaagttcattccactgtgttcgaacttactaggataatatccacgatctcggagggaaactcacaaccaatgagaattcgtctacgttacgttacgcaccgagccgagaaggccaggctgcccgtttttttatcatggaatcttgcgtattctatatttggctaggccttcaatgtgtcggaattctcaggaatcaacgatttgataagtaagctatccgcgagacgaacgagtggtccagcggatggtaatcgaaatcctccaatccacgtccgatagagacttcctaaacggagcgtggtggcgtgattccgccctctccccgggaggaagcgctatcgcttgtcgtaacagtgttaccagctttagccaggctgtaacattcgcattcctcctatgctacatcatcagtcctcactaccctgattggctcacgctttcgttcattcggctcgccgtctgggaatcgttcgcaccatcatggcgatggaaagacgtggaccagacgtattcgagttgatgattccagaatgcttagaccggctgaacagaaactcggcatttcggattccagcaaacgagctattcgctacatccttggagtgttttctatgcacaggctgggtcactgggctgactagagactcaacagctcactgcacgatgttcagctcgaatgcggagcggagcgttgtgcactgagctattccaatagttgtcaggaggctcgacgcttggaggactgaaatctcggtgaggaggaggtcactccgtgtagactgccacgattcactcatgcactgctgccgtgccggacaatcctaccgaacagttttcctccggcctcccgacggagctcgagtcagtattgatgcattgggacagttctaggatttgctccgcagagctcatggaaacggttcggtgaaagtcgagtttcccgctgaatattcggcttatcgctgccagtcagaggttatcaatttgcatcggtctctgcgctcgattgctgatagtcttatctccgtttgttaaagctagcccttgaagacagtggaaacgatatgttgatggcgcagactgggggaaatagaccaagtgactcgatctaatcgtcttgacacgatgccagacatccagactccctcgaagcgtttagggctgtaagccaacctcagataattccatcgctgttgcgatgaccatggcatttgaatgaagtataatttcgactataatgctctagattattgttccccctaatttttcattccaaatgcaccaccgggttctgatattgcgtgggatgtagagctcatctctacagatagttattttctggaaaatcgagactgttcttcgggcggaactaggaatttctgtctcactaactaattctcgttcctctcctccagaacgattggaccagagttggcggattgcgattctatgtgggcgaacctgtgtgtcttccttgccatgaggactggccgaggaagatcgaagaaatggcgcccaaggattatgacagctatggcttcaagaacaggcaaacccatctgaagctctagactacattgttaaaaaaatgaatttgttgagagctgaagagtgtcacagcggcaaaaactggcgagaagacgaataaaccatttgtagagcagatggatctcatgatttagcttttctttggtttgatatcaggtacaggtctcatatatctatggttaaccattcaatgcaatggggtatcaaaaggaatactgaaaccccgggacgcctcacggaggattcgggaggattgtatccacaactgagtcatgtgcccaacgaattcagcagaacttccattatagaatcaaagctcggacttcgccaatcttgaatgatctgccgcccggatcaccgatcgtaaattgatgagtggaaatcccgttgactcgggccatcgttcaagaggcactagggttcgcgtccagatcacgttactcccaatcggaacatgggtttccgccgctgggccaaactcagctcgggaacagctcccatgcctaacaataacccttaggtttcggagaggtgcgagtttgcaaattattgggctcgttgtactacatcatgatctgacgagcgatgagacgtaatcattttgatcatttcgtgtggcttcgaattcctccatcgataattcctgacgttgtgattccatgatgatccaaaccattggagtcccatgatcgggtcgagatcacggaccatgttgggttcatccctcaaacgttatcaccggagtattcgctgtcactgaattttgaaggcactatccggaaaccgcggtgcccgtggacccccgaggagcgggatgatcgactcagggtcctgatttgccgtcgactcggaaccggctgacgcggcccaatgtcgatctcatttccttgaatcgttggacgcagttttcgaattgctctcctgaagacttcctgtaatctgcgttcttaaacggcgggcactcggatgccgggtgctcacgacgagggcaatccgacacttcatcggatcacaaatttctcacagaatttctcactcggctcgcgaaatgtccgtctttgggaagcaaatccacaaagggcattggatagtaaaaatgaaagtgttctcaatggtccgtcattgttctgacatgaatctattcttagccggtcgcatgttctattcccaggggagagtggaacgttgcagcgctatcctcccgtcgtaaacgttgtttccgacttgtgctgagcctcctcgattgcggcgtcggtctcgaaggttctcgaactgtagaagcgactgtcatcgttccaactagtccttgaacggaagtccgatctacattccgaataactggattctgctgaactgtgaactgttgtctggacagtgtcggatcccctcccgacattcgtttgcctttgttgctccgatttatggaagggaccattctctaacgacttggagatgacttttttgacagcgtagcaccggacgtatctgcatcagagatcaaatgatgccgtcgggagcaggggacattcattgtttgtgagagagaatataattcaccgcgacagaatgattctggcttcggactgttccgtcatttcctgtgtccgacatgatcttcggggagcttgaatatcacgttcagcgagctccaccagcatggtcactttcacgtttcattttggactcaatcaattgcaggctgacccgtcattcgaggcaggaggaacggatggtgttgagagtacctggattaaggtgccatctagcgcgggaactcgtgtatagccgatagccgaatctgtcctttctcaccataaaacggggacaccgggaacaaacgcgactcagatcggaaaccgagatcggctatgagcgccacaacggcccttgttgccaccagggatgatgccattcggggtaaacaaaacacagctgacgtctactcggtttccgatgtctcgtgggctggaaactagattgcaccgcttctagacgacggccgagaccgctagacgggctccgcatcttcaacagaatggatccattgtatctcttgtggctcgaaaccatcgcagcccgcggttcatcaagaagcgtgactcaactctgatttgaaatctcaacctttctcaatctaatcgacattggttcacgccacggcttggaaaattgtgaaaaaagggtgttttccagcctcggccgcggtgtcgagcgatgatgcgaacccgctcgactggtctgcatctaggtcccaaccacccgaccatgcctctctctgtcattttctgaattttcctcaagatggttggatattgcttggaacacctgaactaacgttggcttcgcgtctgatgatatcttctttaatgcttatagaggagagagaaacgcctgtcgaacgcaccaggaatcctggcgcattcctggccagtgaggggcttgcaccctctaaaactctctcctctgccttcgggtgtctgggaactcagagaggtttccccgtttggtagtacttccaggaaactcgaggccagcgatcttcggaactactgttcgctagctacgttctttgctcttctcaacttcttggtcatcctcccattttgttctccaggctctcttctaggctgttccgctcgcggtccttgccgcgggaacagctcgccaatcctggcggtgtctttgtgtgctatatttctcccggaatacgcatttgacttttctcgtcgttatgttccattctccttcagatttctgcatctgttccacttattgcggtaccgagttgaatcctggatgacccctcggttgacttagtgcagcgcacgtgatcaccgtgtgatgggcatcatcttcgtccccagagcagcagagtgtgcgcagaggcgagtctgccttccccatcctgaacaggtattgtcggaagtttccatgattcgtcagcatctgcgtggtgcgataagtgaggtctgataattgacttccacaaatgcgcgtgatgctcggaatcattctcccccgtattccagacttcagtgggaaccaccggtgtgcggcaccggaacggatcgtagaggtgcttgaaacgaactaggctccgaagcgcgaacggagcacgaagtcccggcgtgaaccgtcgggcgggagtgattctaaactagagcttcaactggttctcacagcggcggcgttagaatcgtgtcaaacgagatttcagagtggagggcggacacattctatcgaaccaatgcggcctgacacaagtggcgacatctgacggcccttggcgttatctttccaatgagaaagactgatcctcgccggcggcgacgcaggcaatttcattctcgggaagctcgagtccgctgtcaggtcaactgtgtcattcttcgcgatgcgctcggccatgcctcgacgggcatcgcgatggcttcctcccgaaaataccagctgtgccatcgagaagaacttatgagcgcaggatacgtccatgctccttcactatgcaattggagaggaaaaaaatcacggcccccgaatcttcaaatcaagatgaatcgaagactgagggcatgacaaacggcgtgaattccgaccctgcgcaaggttcgagagtcgcctggtgttgaaattcgttcaggtctcaactcccacagggtcgaatcacttgatggttcaccaccaccccaggtgtgatagagcggcgagagcaatttgggaggaccgagtagaatcgcatttagtaccactgtcgattcatggatggacagagatgaatgatgagaagaacagtcgctccttcactccaagtgcttcacaagcgtggtcgctcagggcgttgttttcatcggtcgggctctggtagagaaggtcgaggccatcgctcaacgagagcgatattcgggcaatacttccagtctcaaatatggggatgatccacaacgattgagatggttcaggcgaggggagggggacagtgagtggaaatattatgtgtttcagtatccagaagaattcgcacactcatggtccgaagcctccaagcagaatgcagctgggcgtgcgaaaatgattcacgttcgtgtgagcgaggtagtcaacgagcgagcaaggcgactattgtcaggtcctgaacagaggcaaatctgtgccaagcatcgctgtgatgagttcctctaatgagctcgtttgtagttgacgtcttccgcggtactctggaggctcccgaacacggaaaaccgtcgcagggatcgttacagtatttaatctcggtaaccaggagcccacgatgaggagcccctcccaaggtcgaaacccaaatacttgttcggtgtaccgctccgagtcctcgcagaacgccgaaatcgtcaaaatgtggtttttgattccctatccctcgatggcagactcgtttgatggcggattcggatcgtgacatctctttacagacaacactgcttgctgtcgcttagctgaactcggcgtttagcgctctcccattcgatgcacgtacctcgctgtctcctcaagtttcgattgaaaggggaaacaacgacgatagtaactcctacttgctgttcccgtctccaatagcttctggagcccgtcgagattcgtcgcattcaacgcgtttccaagtgagaacggcgacttattctccaatcgaaaataaaaccgttctccgcacttccttcgttctctattagcctctcccaaatcgagaatcttggcgattcccgggatagctacgtctaacttcgacagaagtcgatacatctcccgatgaagcagtgttgcgcattctgctgcttacggctcgaccaccgcggttgtctctgaccgacttatagtcggcgcgttctacagagggagttcctctcgagtttgctcacggtaacatttgacaacgatgacgggagccatctgatcatcgtacatgcatgcgatgtttttgatttgacggcgaccggggtacgttaggtccatgagcgagacaatcgcgctcatacatcgcttctacttgttccggctctgggttactacacacgtctactagatgaaacagtacgagctcgatatctccgaccagattcaccattagcatcatagcgccatccagagaaaaattcatgggtttgaatgaattgttttccgagcgcagttcgtggtcgcgcgtcatcgtatggaatccgtccctataaaattcgtggacgcccggacgagcatttcagtgtatatatcagaagtttggcgtcgcgcgtgaatgactgttctccgagcgatctaggagtcgtacatatccgagcagttcattccaatggttcccctcacgagtgaaggaacatggaatcctcgccgtggacagagccgacgacgggcacctcccatgaggacgcgtctgcttccgttgaagaactccattctacagactttcgggtcaaatgctcgcgagttgaaaatgtaatttttcgattgcgcccacaatcgtggaagttccgtcgcatgcaatgccattcctcattggggctgggcctgacaaaccggagagctcacggaacgcgctacacatgcgtacgtgccgtcgattaatgaatcaaaggtcgataacagccgacgtccacccagcagcggcctctccctcaatccctctcggggagtcgagaccgaagggaatcaaccactcatggaagcctgcaatctgaagtttggcccatcgagatgatctcaaacacccgctccgtaccctctgtccgagtgtggcgtttcttcgcccggatcccagccgtgggacttttcacctcggactccccgtagatgctcctcgcgacatcgctcgccggtggatcatttcgaatcggagccatcgatcgcggaaccctccgacacgctgctgaagcattagaggaaagcaacgggaaaactgaatttcggatggcaagacagatgagacgcctcgatgcagcgtgggtgacatacgagttgtcaacggcacgatggctcgacacaaggtatcgccttcattgtagttcaacctgggatgagtttcggtgtcgcgtattcgctgctgttgtgctgtttatcggtggggcatcgacccctttgagacagatcactttcgttgagcgcgtgctttcacacccaccgttctgcagagctcgatcggtggagggctcggcgaaaacaaccttagcttccacaaacctgttcgatgctgcgctcgagtcgctggaaaaacggttggactgggcactctcgtaccaatggcgacgctgaaatctggaaagctccaagtcgtatcaggggccgaccagtttgcggcattcgagctttatgacggatgcatcgtgcggcccaagagaacgggaaccacgcaaaacggtcttgtggtgagagcgcgaacggtgagctgaagcgtcagcggtgagaatcgacctcgcggactaaactatatcgacgttgatggttccgtgaacccacgtgtcagtctgcacgtaggtgaagacagcgctgcgggttcgctgtatgtgaccggcgcagaaaatgggacatccattgggaatcacgattaccattttcgaagataaataggtcctactctgaggcatcattgaagagccccgcgagtcgtcagggtatttacagcatctattcgcaactatgtcgcaactcgctttcgaggagcgattcctacaaattgtgctgaccagcataaaaagtgtgcgaaccctgatggcgacgataacgttgagaaatctcttccgtcgcgacgcaacgagaacggtggattgtttttctgagatcggcaaagagctgacgaatgtaggtttgtgttgccctttttccggatcgcatcacaaatctaatctgtattatgaaggggcggttccgcgtcttctttgaggccaactccgaactcacttcggtgtcagatttggtcgcgttctccacaccaaagaacagcatttctttctatccgatcgaaaacccgcgaagaccctcgaaattgagagaaaaattcaccggagcgcgcaaagccgcacacaggactctctcgtccgatgcgaaggggcattccatcaggggaaagatggttcccaagcaggaaatatgatgcatccccgcatctcttgtacgtctaagagggtcatttttggcgatgttgtcttcgagaggagtcagaaggaggcggacaaccgaacgagtgatttctcgtgagggagagggggggctcccatatctagggaagtcgaatcgggcagcaggaacggaatgacgagcgaagcgcacgctcggagaacaggatgagaagcagagccgactctactatcaaggttccaattgttgtttacgttcagttgatcctgaagcctcgcgcagtaatcctactccgcgtgctggtgttgcatccgcttccgagtctgcctgcctcctcgcgataactctttcttgctcgcctcaatggaatgcgaatggaagcttgacactgaggcgaaccttccacccagacggggcacaatgtaggaagagagcaaaaagagaattggggagatctgttgattcagacagcttcgtattcagacaatccggatcaacgggattctatttccactgttcccccgaaaaaagaaacaggggttaaacgccctctcgatccttccggtgacagagtcagagtgtccctgaattagagtgtggcccaggtgacactgaggaggaaattgagatcaatcaactcacatacggaaggaagatcgcggaaactggtcagttatcaccaagatccatgtgtcgtctagcctctcaatcaggacgatgcgactccacaactttgcgggtcggaaccagcgttcgttctccttgcgtcgaaattgcggaaaagatcctctgaatcgagaagtggagggctcctagcggagagttctcagctcccgagaaccgtcaaagggtacagatgaataagagtcgatttcggtgtgattctccaacttggtggatcatgtgcaattgagggttcaactcgatcgccctttttctccgagatcgagatcagaggaaagggaacgccattgagaagtgatgttttccccaacgttttcttttcaaattgtttggcgtccagggactcgcggtcggtcgctttcgattttgaaggacccgctacaacactactcattcattttcgaatgagttttcctgcacgagagacaatcaattctgaccaagaaaatgtatggactttttcggttctctgtttcagcgatcatctcaacagttgggggaagtcgttgagccgtcggagcagtatgcggcatgaacagacagaaatacggaattctcgatcatttgcacttttggtcacggatcgaaatcttcagacgcccatgtagagaaaaaaacttcttgctctaactgtgttattccactatcctgaatactccaccaacggagctaacgacgcctctcttcgaagagtcgttaagttaatagtcgctcgcttgagccttccatgatttcagcttagtttggaattgcagtggactgcatcaataggttgcaaatgtatcctgtcgatgtgaaaatcgtaagaggccttggagagatgcgcgcagaaaggacgggcagaaaatgagaaaagtcttcctccacgttagctcggagccttttccccctgattgcttcaatcaactgtcatgctgtttttcctgaaccgaacaactctgagaagatcggagctccgagcgttcatttactcagccctgcaacggttctctaatttgtccctactcagagtatcgtcgccgggcttctttgggagaacacttgtgaatgtctcaggagatttccaccagtcgagcgctcaaagctaagcttgtttgcaagctgtgcaaagcgcaggtggcgatacagtaggtcgtggatacagagcgcgagaaagctagcagccgagtcagtaggtgagtgcggaggctgaaaaaaggatttaattaacgaacgaattccctattggcaggtgtgcaaagcagtgaggattcctcctacaagtggatcggagaggctcgccgaacgaggagttttggaactttggctctttttgtcttcgccgctcacaacttcggttcaaacgaacttttcaggagaacgcgagactctcagtatcgtaaaattgtcaatgaattagatcttcttcctgaattggcgagttttccccaccaagcagactgtgtttttttttctggtggcccgccggtcaagacgcggttggggcgactcagcccggtgagctcgcagcttttcgcatgttcaaccgctcgttgtcagctgaccatctcgcagcggtgcctatctttcgcctctcatcggttggggaggcacgcagccactcgatcggacggacgagcggacggtcggtcagtcagcaaaccagttagacagcagcgggagaaagaaggaagcgagtcggctggtcagcgactcgtcggccagccaacgcaatcacagaggaacacgaaggaggtgtgtcttcgaagggtggactctgatgaatagctttgtactggcttcccactcaagacaccatccgaccattcggtcaagccagcagccgactgaccaaccgatcggtcgcgcgagattctgatgatccgaggcattccgatctcgactcgccccgtgaaatgagtcaaggaaaagacacgaaagttcaactcgacaactccccctgagcttggagacagcctggtcgctgagtcctcaacggcgagcaggctcttcggacgcgcttcacagctttggacaaagcggtttccgtcggagcgacatccactgacggaggtgcatgccaatcgatgcatgggagcacatgctccggaaccagtcgcccgatgtgcgtcctcccccgaagtctctctcccacggacgttccgttcgatccagaggacttcccatgcttattactccctctgagacaccacaatggatcggcgacgttaatcaaataggttaagcgaacaactccatgaaaacttcgtgtcgaaattgctgcatccgcctatctgagggcacagctcccagtttggtaattcaggacgggtatcgcggcggggagaaggggcggcgagggatctccacgacctcgacaagagagttgacgagttgggctggggcgcgcatttcgttcaattttcgccgagctccgaattaagaaacagacacagcgagattgaaagccgtataaaggagacaatgaaggctgtagaaggactgcgggtgggagggaaacgatcaagacgaagagggggaaggatttttcgtctaccctctcggagttcctcgtcgtcgaaacggaatggaaaaagagaattaaaccggtctcagcgttagtcctcgaatggcagcggagagcgagaaagtgaaaaacgcccgtttaaactctttgggaagatgatgatctcttcccgtctgctcacagttccacgcggtaaactcctcgtccgcaacctggcacgaggatcaagcgacaccgaatcttgcgattcatcggacgaacacaatttcgaacggaccgttaacgagacaaaccgcgaatgagcgatatcttgtgcagccgccggaaacacacttcggtcccgtcgctttcatcgtcacttcgaccagtgcccacctcaaaactttcctctcgctcaattttcctcaccttcctcttttcccgtttccgtcccccccccccccctctccaccgctattctcgtccttcccgttcccgatgctccttttttttctcgttgccgttcgcttttttctagtcgcagttctcctttatcggttgaagatcatttgttagcggctcgtgggattcgacatgtgttgctcgggctcgcaaacaacgaccacaaaaaaaacatgatgtcctctgcctttgttcggcccgttcgacagcgcgctccctcgccatcccgtcgggatcggctgcgcggtttgaggagaaaaaaacaagctaacaaaaaagctcggatattgaggaagaacctcacatcttgaacgtccagtttctttggtgatctgcgatggaggcctccaggtcgctctcgcactgccgcaactccttttcatcccgtccctctccctgtctcttccggagctccttcatgaacgagcggagcatttctgattaatcgaaaacttgttaagttttatgggagaatcgcgatcgagaaatgatttcgaacacgctcctgctttccatcgagtcccctgacgcatcgtccattcggagcctctacaccctctagctgttgttgtcctctaattcatcctggattttgagcgcacaaaacgtttatttcacgaatgctctccctcgtcctctatacatcacgagagcaaaatcatttcccgcgatttttcaatcataacgatcacacgccaaaatcagagctcctatgtgaggaagtgcgagagctccgcccgtctcgatcaggtccggaatcaaatggcgcgttactccctaagtgtttcactggaaattccgagcggtgatcccgagcttgaattcctgcgcgcctcctccaggccgggtgcggcacggggcacgcccgaagaaaacgacggatctcgactcgagtcaaggcgaccgttctcgatatgtgcacggtacatagggggatcgacggtagagatagagtcctctgctgccctctccccgcgtaacgggccagaccgctgtaagaactcggccatttctccggttgagctctatagtgccggttttcggcggaaaggatatctcgtatttctgttcttgaacctgtttttcgaacacatctcaggcatttggcattcccgcgcaacgtttctccgcgggtagaaggaacaagttcagacacttcaaacaccgttcctatatccccgcctgcgtgaatgtggctgaagtgttccagagttgttatcaggtacggaacacttaccgatgatgaagcgcgtccttgctatgggaaaggtttcttccacattcgtccgtttcacacccatcactctttccctgtcgtttggatggagtgctcgagagcatgaccgccatcctgttgggaagggctatattgggttatttcttcggtcgattggaatgttttgtaactccggtacagtatatgtacggggcggtcaaattggtcagggacttttttttgccgtttttctcctgctcagtgagcagattccggaaattctcttggtcatcccttcggctgaatttttgaggtaaccaacgccttccgtcgttcttcgttccatataaatctttgtttctcgaaatgggcgatgtttttgcctcaaattcggagggctaccagcaatccggtgataccagcatccctctctaaactaggaagaactaacgagccaaagcatgaggaagtcgccacggaaaatcgttctttcttgtgtttttgccgaaaactgaccactggggcgggagtcgagtttcgatggatcagcaaaatcgaccagagaatgtgtaatcgattggatgggagaaagtatactcaacttaagcatggggttcgtgatcgggaacaagttttcgagaagttacagagctctctccggtcaagtttcggagttcccgcggcaccagtcattgtggcgacattttgatgctctggctcgttacttcttcccattggagaacgggattctggtaacatcagacaatttttgtcagatggacacccctccacataacaccgagcgaacttagctgcccctaccgtagaaaattcgcgagccctctgaatttgaggcagagaaaaattcgctgactttttaaaaatgaagattaaaatggaacgaaaaatgattgaaggaattcgttggctcaagaattcggtccaatgtgggagctatattctgcaagaagaatatccgaaatcggctcactcttctctgaataagagtcagaataaaaatggcgagaaaaattccagacccacttcgaccatcttgtgtgtattccgttgccccgattaccgtcccaaagagagcgaagtgtcacggagggcgaattgtcgagagttccatggccgaactgtaggtccgaacactccgcggactccgaccaacagattttgcttcgcacaaaattcggatcgagcctcggcggatcgttcggctctgagagtgcgaacacaatcgccaaccgcaacagccgacagacttctagcgcaccttgacttcggcaaccatccccgagatcagactggactcgatgccacacaccttgagattgtcgacccacacgtgcgccgttatttctccgctcctgaggctgtgagaccagcctctcagacctctctttcgagggaggaggactgcggagatgttcaataataaatacgagaagaggaaataaacaccaactgacggagcattgtgatgcatcggcgcgcgttgtatccatgtgtcgtttttcgcgactcccgcgacggtagtaggcggcctcgaacgacctccagcccttctcccaacccctcgacttccctcgatccttcacggtcttctccacagagcagagtcagcacgcgagagccagatggcgctccaaaccctcgtaggagtggcctcgagacgtgggcggacgttcggttcaggaaaagccacatccagtaggctctcagacaggaacgtggaacgtcgtgcggtgccattcgtccagagccggtgtctgtctccacgtcagaggaagcgggtctcccatgccggtgccggtgacaatttacaacatgactaatgccgcctgtttgagaacgatgtccatgtttggaaggatttctgtgattgttgctgttctcgtgctccggctgaacgttgtcgctgcgtctggtgagttgacggaatttctgtcgcccgtcgactattctctatggattgacagaacgctaaccgtcggcgatccgtacttctcgcccgctccctgttctccgggtagcgggaggatttttatgtgattgtcaccagagcgttccgtctgaaactgggtctgcgggcccaacgcggcgaaaactgatcgcaaggttccagtgctccctgatccgagaagttccgaacgcatgtgaggttccggagctgatccaggcgaaccgctccggaaacaagtggggttgcgcgtggggatctcccttccgctgcaaagagctccttatcgggaaaggtttccgatatgaccgggctctggcacccggtccactccgaggctcccgagctcgccttcctctagctgctgtcgtcgacgtcgtcgtcatcgccgacgtctccaatgtcggctacatattcatactgaatctgcgaggcgcacctgaagttgctttattaacaatgcgttcaaaaatcctcctcgcgcctcctcctcgagtcgacgtctctcccacacgggatgatccagcagcaaggaactacactctccgttgtttcaagagttatgtcaatatcgtcacaaagcaccgatccaggaagagacgttgggcgaggagaccgtgttgaagcgaaattcagcttctcggccccctcgagatccgatcataacagcgacccctcctcctgatggcggaggcacgtgcagctgtttgaaatctacctcgatccgcgcaaaggactgaacaatcgttgtgagccgatatcgatgggaacggaggtcaacgaaacatgcggaaatgcccgattgccctccgggaacggccgctacagcgggataacctcaatcggagccgaaaaatctcagagacgaacctccgagattctctcacttcgagaagttccaatggtgggagacgatttcaatcctctctcgacggaaactctcgcatcggtcacgacaagggcggtctctccagttcaagtgtgacacgaacggaggagaaatcctgctgtgaccaatctgtgcagttgcggtttttgcggacttctgctcttcttctgaccgctccaccgaccgagttgtttgtcaaagcgacaaaaacgccaacctgtcaatcagtagtgaagggagacaccgctgctgcaacctctaccgagagccgcctcccggaaattcctcccgctctccccggtcccgatcctctcggatgcccccctccccctcgagtcctccccggccgagattacgaggaaagacaaaccactcgctggagttgtcgggcacgcttcagcgcttcagtcaagattgtgcagtagttgcatacgttcgggagggagtcaggagaacagcaacgctttacagaggattgcaggacgagctccgggtacgtcagggatccttttgaggtatcggattcctcctctcgatgatctctcggtggaggctccggagttgtgatcgacaccgagcgctcgtcgtacacatgacgatgcggagcgaacccggagccgtactgtttgttcttgtctctgttgtggtggatgatcagcgacacgaataatgttgttcgccgctgaggcgcaaggtcaacacgtgttctggttcgaacacgaattcgagttcgaagcatgcgctgcaacaccggttagcaacggagcacgcgaacgagcggagctcagaagcgcaaaatcattaaaagcccacgcgtccacgtgcacaagcgaacacacacgcacaaaagaatacgctttcagttaactcgccggccggcgcggtccccgcaggcggtcactcttgccccgacaagcgttttgatggatcacaacgtttgtcatcgtttacaagttattagcgccacgaactgcgtgatgcgtgacacgtgagaactattggcagtctcgagcacgaccaatggtcttcattaaggccctgaactgtagcaacaacaacaacaacggagtaagctatgcgcaattgaaacaaacgacccaaaccacggtagaagcggctcacgatgggttctttcgttcgtctgaagaagctgcgatcccgcccggtcccgatcgagtcgcactcattcaagacaacacgagcaactcgaaggatttctggagaatgcatacacggtcgaagtttgcggtcagtatacaactgatccacgaagcggagtcaggagcatgaacgagtctccgttgtcggtccgcgccgaaaccgtgggctccactctccttgtactgacatccactctctgtgactccgagtgtctctcagggacagacgttagtcgcggcctttaatataatatgataatcttaaagaggggtaattcgtcctgttcgaccagctccccgagaagcgctcgaaaagaagacttgtgtgttcgagcgtccttcgatctaggagaacctcctgcccgatcgcgtagtcggctccgagagaattcgctcgagccacgatcacgcaagctcgcaatgcgccagttttcgcccgtccgttctcctgatactgatcagcaacgatgctagtcaagatgtgtgcctcgtcctccccgttcgcggtctcttcccagagcaagggccaaactgacgagaagcccagttttccacaagagcaagaagaacctcgttcggcgtaggaagcgaatgaatgaagaagactccgaggaaagtgtatccgcgcacatgtatttgtctaccagtctctgtgggtttgtatttgtgcgttgtcttctcgtggacagctggatttctcaggaggcctggtccccgtcaaatttcaaatcgaagggatcccttttatctacacagaatttttttgcaatttctccctcccccgttcgcttcttgctccccggtgtgtcttcgagaactctccgagagggctcgtccgacgtgcggatagctctgcccgtcgaagcggcaacatctataattcataatagcactgcatcaagtctctcccatatcgacaacacgccgacatctccactaactcgcgagtggcacggacgagtattgtttaacgaagaaactttcctcctcgatttcccgcgtccgagtcggagtcgaaagagccgggtggtcaacgcggttcgcatcaatcggccagattcgcctcgacttcctcttttccgagggcctccatctacaaccgtcgcatgctagaaaagccactcgcggaggccagcggggcaggctcagcggtctgagacgggattgcacgcctgcgcaatgtcagcgggtgcacgtgagcacttgcacggctccattgactcggaggtcgccggttcggatcccggccgactctctggacatggttccctccgagacctctgctcgagacggccatggtcgccgaatttgaattgatctcgagtcgatggaaacgggggaaactgtcgattgacggaacaataccgtcgaattccacgacagctcatctgaccagaggcgggagcgcgtagcagaccgaacgagcgttctactgccgacccgctcaaaacaatgagagtgattaacttaatccgaatgattggttgctagatggatgagctcttcaggagcccgaaacccgatcagggtgtgaacgaccactgcgggctcttagacatgttgtcggtcgacaccgctccagctaacaccatggacacagggctgaggggaattcggggacgggggagcacggggctgtgtgcgatgagagatggacgcaaacgagggccaagggggcagtccaggggagcccgaggggtcaatggcagcagccgcaacatcgcgaaaggcacggtcaagcctaaagcaattaacaaataggctagctagcagctgattaggctctccctcacaccctgacagcattcgactgctgggttagaaaacgatttgccacgatccgcccaagctgtctttcggaacatcaaagccgtacgatggcggtggtattattattggactttgtagttgtatgtactatcacagtatcattgtcaatgtcgctgcaagctgctcaggtgtcacagtcgtgcagcggcgcaatccgctaattacggagcttacgagctcagataattccgccactgcctgcaacaagccccacggattaaccaacgttctgatatctgagaatagcgttcgtgcggggcattcgtttcttcactacttgctctccgcagatgggccggatctcagatggaacaagcatccatcggggacgtcgctccccaggagaaacattcgctccgttccgggcgaacaaaaagaaactcagagtaaacacgaggagaaaaattgaccttgatgccgttggaaaccgtttcgctcgggtgaggacgagggaaacgaacatcggtgagctgagaaccgatgcaggatccctaaccagagtcaactgcaaccagcgggaaattcgaagcatttcgcccgagtggtcgaagaattccgcagaatgctgtccgcgcggatcttctctcgctcggagtgaagagccgtgacacctcgacgaattcgcggacgaattctccaagcagcaaaagtcgctgcgacgaataattgcgcctggtatcaatcgttcattgattatctgtcagctggacgggctccaactctgtggagatgataaagcgattcgatgactccgttatcaactcggctatgcatgattgtaaagttaccagcgtgcatatagaccagatgcccgaggcacggagccagtcacccagtcgccaagcgggccgaacggggagttctcctgcgtcggtttctcttcgcctgcactgcgcgtacatccatcgcaacggcgatggttcctctcgatacgactgagaacgtttccgaggtggagcgagttttcgaaacagatccccccccccctccttccgaaacttgaactctggtttttcaccgccgaacacgggggctcagttcgatccgacttgtccattcggcggttgtggatgtttttgtccggtattctgaaatttcacgggatttcgtgccacgtatctgcccgggaattcgcaaatggcgttggaatgacactatcagctgatccccgcatcagcgcggctgggtctcaacgcttcatacttgtatcaagcgtacattgtttgacctcctcatgaacaagctctgtccacaacgcctccctccgttcccggggcacggactccagtagtcagtcgggcataggcaacagtcgcggagcgctcggtcagatcgggttaccgcggaggactgcaggtgaccgatgactcggcgctcgaaatcacaaggcggcgtcggaggctcgactcccggttgactgttccctcgactctcgtggagcagacgggaatggtaagagataccgaaacgactcgggagagttcagcccgcacgacagaacgtcgacgagtgggtaattagttcaagccagcgctgttatgagtaacgagaccactcgaacgataccatagacacggcttgacaaaaagactatcacggatgaaatgggctgacagtcgttgtcgaaagagtcgcgtgcccgactgagctacatggggttcatttcggcctgcgagctgtctattgtgcaccccagttgtgtttaccaactggcgaacctgcagtcgggtgattcttcggaggtgtccgcgaccgacatctatggccgatgccgtttgtcgtggattcggaagccgggagctgcctctccccggttcagggattgaagctcggggaatctccgctgtcggagttggcgttcgcgaaagtccgtgtaattggcttgagtggcgacgtctggcctcgatgaatgaggctttgaatctcgggatgacaggtcagtcccacaggagagaatcgaccgctcgagtccacgatgagaactcgagaaagcatgacagttctctctgatggaatgatgaaaggggaaaaactcgagaggcgtcgtgtctatgattcatgtggaatcgcttggggtatcgaggcgttcacgtccgtttctgaaccgcctcatccccatcgactcgcgattgaaaacgaggtgtatccatgccaccaaagatttccttcgatttccgagaggcagacgctcgttttccgagggaacagagttttttcgaaacaggacggtcgcactgtcgaaaaatcaagaagtgaatccgatccgcaacggattgaaagttgaatcggcgactgctggtggagtcccgatgcatacgagcatgtcagcggcacccgtatgatcatgagatctatcgtgattatccactattagcccgaactggctgcccgttgctaaatggtatccccggttccgccccttcatggctgccctggtcgtcgccctgaaagcctggacgagtgcggactcgttcccgctcgaggacgtggtcaccctgtcacgatgatgttacgcttgctcactcgacgaactcggcgatacatgctgtttgataagtgatatagtagtcgctgctgatatgtgtgccgtctacgggccgccgcgggagcggacattcgtgccaagttcgacatggcataacgagacgctgcagcgcaaaatctcttccgtgcggggttttgaaagttcgctcgttccgctaaccgaacggtatgaggtgagaattcattaagaacttctgcttgggttcggatccggcatggtaaactttcctaatgggtcgagtttaattgtacacagtgaacgccctacgacgcttttgcgagctctcgacgcagtcttgcgcacacatcgtacaacatcgctttgtccttccgaagagtgtccacccacttcctccgcgcctgaggctcggagtgggcgtcgataaatcttaatagcgaaaattcgatcctttctgttcttcgggatcgggactccttcaaaaccctgctcaaccatcatggagaacgggacgcggacattcggcgccgtcggacggagttcgctggctggacgaagggggatccgaggagggggagagcgaaatatgataaagttcgtgacgcgtttgtggtgatgcggtccgcgcgacgaaataattcgtggagacactctttcaaatgcgtgtaatccactgtctcgagagatctccaggtattcatatatcacgcaacaaatgaacttatcgaggacactttcggggcgcgccgcaatttcagatgcagttagccgagggtttttattggattcggagcagaagaagaagacgaagaaaaacccgaggagggagagtccagtgagcttaacccaaattgatgcaaattctactccatttattataatggcggctagcttggctgacatttatccgacacggacctcctttgcggtagcgtcggaacactggagaatatatgcgacgtatttctcgcgtgctcgtgtcgcccgagtccaatgtctggtggttccccgtggtcctcgcgaaccagcgggacgatgcgcgttttcaagcctccatccctccacggagctcttcccgctcaaactgtagaacccctgaaccattcgtggtgcagaaacccgctcagcgttttcgaggtgccgcgaagcacgactgttcgatgtccgctcgatgttttccttccgtttgttgctgctcagggttacgtcacaccggggcaaagcttgttgccggctcgggcgttcgcggtctcgcgaaacggcgtgccgcaagtgacggctgagctctctgacaatatttccggtcgagtgccaccagcaatcgttgcgtcgaaggcaggagtggaaacagcaagcgtcgcggccgggtctgtggagtgcgcctcgtttccccctttggctgctcctggcgcgtgtcggaccacgaagattttcactccttgaagcgcggaaatttagccaggagtcgaagaacgctctttgtttgatattgctccacatcaaacattctctctcgatgagccgcaagctggcccgcggtgggtttctcgtgctatctcgatgagggcgatctcgcgtttcggttgagctatcagatctcactgatcgctggaactcgtggcgggggcggcgtgacttacgggacagcttcccagccggacgccgggtgcccactgtaattcattcatccggagtaattcgattcgcgtttttgaaaatacgcggaacgaaaccgaacaaaagtttttcctaggcttcgaacgaggcgactgttcccgggctggactccgagaaccgcatggcgagagtcagaaattccatcataaaaaaaccttttagcaccactttcattttacaaggctgtcctccgagctcaagagccagctggcagcctttgtcaagctcgagctgagggacatcagaagtcactcaaaggcgcggagtatcttctgctcctcccagatttgtgtgctcgagagccgttggcaagttcctgaaagaaatccaagacccgtttcccgagcctgaccttgacgtcggagttcggaggtatggggccggtctcacggaactcggtactgttgaccggttgtgctccgcagctcacatgggagcatggcgctttcgaatcgaatacatgtgatgatgactatcatattgatcaaattgttcagcttccagccatgtttgaatcgtcgatgtgatttctcgcacgattaagacggattgggagcccccagactccgaagcgatacgagatcagacccgtgacggatagagcgaccagactgggagatagatgcgcacgagaggaacatcgacacggctatgtcgggctccaagtgcgaacgaatgaatgaatgctcgtcaattcgctctgtgagacgccatcgtagaaatacaaggctgcgtggacaacaccgagtcgcccctaatctaataactcgcgttcatcaacccgactctgcgacggcctccctccgctcataatgaggcgttagtttactcgattcgctttcacggtttgctcgaagattatcaccctctgctgatcgggcagcgctgcgctaagccacgcggtcggaaacaacgggcgcgaaggttggcatcttcacaacttccagaaccgatgagacgccagtgtcgaaattgatgaaacatactcaacagacgcttcttgaagccatcagaagtcatccacgaggtttgaacttcttcgttctcctccgagtccaaagtttgagcccgaatccggggttgctcctgaacttgtccgacctgtctcggcaggcttgaaccgaacgacgtctgtcgccaagagaattacctcgttctccacttgccccgaagagcttctgccctgcgagcgatgcgataatcgtcctcaatttttcatacagttccaccgcggccaggcacggatcacaaaggatgatgcatcgccccttccatctccctctctccctgcgtgcgctcctgctttcttgccagctccccgggcgtcgcagtcgacatctttctttgtccccttgtgtcttgatcctttcgtctaacgagttcacccgaccaaagctcactcaggagcgggacgactggtcgagtcgggggacaaaatcttcgaaagttctcttctggggtgcctgtggactgcgacggaccgatgatgttgatttgaaatgtggttaactgtgtcagctcgacgctaacgatgcctctccggtctgctcgcgtgggagcgagtggtttcgatcgagagagcgcgcgtgtcatcgtatcaagtggcctaaactccatcttcggaatgcgcatcctcatcaaggtcgctgcgaaacgcgaatctccactattttttttctcgggctcgacagtgcccagtcccacccacggcggttcaggagctgattagcctcctggctcccaccgactgtggggtctcgcccctttccgagctctctcgattccatcgctcgtgcccagtagcgagcggcctaacaatcgccaacaacgtagcgacccaagaagccgagcaaagagtcactcagtcctgcgtggcctaataaagcgattcgtttgaccccaatcagtctgactggctagactgctaactcgtcgcttggttgatttgttggcaggcggacaggcagctggcctggcgacctgcttcccctgcgggatgccgataaggtggggtgtctgtccggcgaagatacgagcagacgaaacgattaaacacgcgccatctcaactgattcagttggtgaccacgatcgttttctctgagttcccatcactgggtccatttgttgagccaactcctgttgaatcgactactcccgttgtcttgccggagcgcgtgcgtccattctcctcctccactaaagtgaaagtgtttcgtcttctatcgccttcgccggcgcggaggctcccacccggaatgtagacgacgacccctccgaatctatcaggcgtatcggagcgaaattgcatttttcaacctcattctctgctgaaagacctctcgcgtaaagaaagcacgtagagtcaatgattacgtgctttgctttctcccagtagttaccggagggaacgctacgcaaaacagagcggcgttctcgtcgacggcttgcgtcggagcctaacggagatagcgtatcatcttcgagatgggcgctgaagctctgtctcgatgaggagtttgctaaacgtgtaattagaagacacatcagagctcgatttgaaacggtggacacggagctgccgtttcgacatgaacttcctcgagatcgtcttctcggctctgatcggttcgactgctcgagcagaataaaaaccccggccagatcagagcaacagataatttcgctccaagtgaatccgctcttcggacaggaggagaacgaatgctaggagaacggccaggagaacagcggatgagagcaagggaagggcaggaaggagaacggaggcgatccgatttctcgtgcgagctttctccgaaaatggagatagatggagttgggcgcgcatcacgcgatgtctgtagaatccgtaagggcggcaggacgaaggaaacagaggaggattgattcttgcgtgaagtatctcgggcaagcaaatgcgattactcgctgctctggccagcgcgttcgcttcggtaccaatagcaacgacgactccggcacgaagatctatctctggataattgtttgaactcaattcaacgccgctgcgtcgtcgctccgataaactctctcagatcactgaggaccaatgagccccgtcggcgtggacagtttcgaggtcgatagccattggctcctcaacgtgtggtccacgagaattggtactaaaagctccgccgtctggctccactagggccagtgtcgacgattgggtatgggggatgtggagaaataccgtgtaggagagatcgcgcgcccgctccaaagcgagcagatccctcgtaggactcccacgaccatgaatagaactgcggacaacaatgaacgagcgtacggcgacgattcgaccgagcaagcaagcatccatctatccatacgaccgaccgacagacagagccatggatgaataaggatttcctgcgtcttccaccccaaccgcgaatctctcattcatatagcaagaacaaaacgttccacgtgctcctggcctcctcaaatgctctctcccgaccatatgctctcttgcgtatgagagctcgtacatgcataccagcaaacagcgcgtgtgtgtttggatgcatctccgtgagcgcgtaatgcactgcttgcctcgagttttattacgtaattcttcgtctcctcccacctttttgcaacactatttcttcctctcactccgctagcagctcgatgctgtaacgctctgcggcttctgtgctgccgatcatcctgaatttttacgatttttcttgaagccgcgaagcacaagaactcgagtcggatggagcccacactcgaggatatcttcggcgggaaattcaaaatatccggagtgtcctgagcattcttgcggggctcgatcctgccttgaccgctcgaggcttctacctgtcgaggctccgtgggacacgcttggctcgcatggatatcgtcgtcgcggactcgattcatcggagagagtcagatttcttcaaccgaactgaatccgttgcttgagactcggacagtcggattacttcatcgtattcttgcgtcctcaatcacggcgcaacgtcgagttacacgtgcgttgggcactggtaggagctcttccggacgctcaattaaatctcaccgttccttctcgctccgccgtctgctgtttcgcggaaccccggaaacaaaatagtgggaggtcggggcttcgaatttgattcgctaccgttacttatcttcgctctgctcttcgtacaaaaattgtcttagcgtgatgccactgggaccgaagtgcgccagagaacatggaaaccctatctgcgtgcgctccgggggcacccgagtccggagaggcttcatttcctcaagacgtgtttttaacctctccgtatctctgacgcgccgatcgcggcaatttctagcatcggagagcagcgttcgaaaagagagatttcctcttcttccgatgagaggacgggttcctgattttcctctcacgagattaatcggtccgagatactaggtttccacctcggacaccatgaacgaggaagaggatccatctgaagttttgcctccctgcggaatgcgaggcgctgcgggagggcgctcatctttgtcaagccatggagtgcctcatgaccgagcgccgaaaagtgggtttgagcgctcgctccgagcctcagcgagagagcctgttgtcgggattagaggagggagcagcgacaagtccgtgtttgcggactgagtgtagtatcgtatggcttcgatcgtgtgggagtgagtgtgactgtgagagtttatcacatgtagcggctgttgggctgattatccacttgggttaacgaatgattgttgcaggagtgacccgcatcgtcgtgcaggaaggacagcagacggacgtgccgtgcatcacagagcagccggcgttcaacaaaactaataatgtgcttaaggtttggtggttccaccagaaaccagggagatccctcatcagcaatccgttctacacgatcgacttgactacgagcaatcaggtacttttctccacttccaatagtgattcgcgaacttggacgccgctaatcgaatccaaacccgactgacggctcgatcggatgccaccgaccgatgcggcagagattcccgttcgggagtcgatccagatcagattccgatcaccggatgggtcatccatggcagcggctcggtgtcgttggagagttaattagcagcagctcgcgagacggctctccgaatttgtttgtcattctttcaggttctccggtggtcttcagagaaatggacgacccgagcctacttcagcttgctttcgtatccgtattcgctgaaattgattcgcttggagcactctgatgctggcagctatgtctgtcaagtgcatttcaaggatggtagcgtgcggaacggtaccgttcaactgcaagtcgttggtgagtgggctgcggagcggttcatggccagaggtttccaggtatcgccagaggaaaataaggatccgcccttccttgggagaaagtggcaataaatttgtggaatactcccatccgacattccgaaaacaagacaagtcgaatccgggacttttgatctacatatatgattctgcgagggttctagagtcccatcaccgctagtttccgtcggttgactgattgcgtattccgaaatggaaaaattgctcagctttgagcatgctccggaagatcaacgtgctgggtgaaacaccgcactcaactcctgcgagctcaatcgctggtagatgttttgtagaggtcaaagccgccctgaaattactcgattcgcgctgtggcccgaaacatcgtcggagaatgagggttcccagttgtttaacagtcttgacttccgggcatatcggaacacttcccgcgttccaggtagccttcaagcgatacaacgggctgatatcgtatgcgtagtgtattttggaaagaggagaacgattcccatgtttccacccgtttgaaggcgctgaggtgaacagacccttcccttcgcaaaacagaaccgagatcaatcggcccagtttcttcgtcgatcgacgcgccccgatctatgaagagagcgagaaatcctcagggtttgcccctcggcctcctaaagctggacctcctcaagtctcgatccatacactctccgccgcacgcgaacaactatttgctagagatttccgttgttgtatcctccaaatcagccctctgctgctgtccatacgtgatccactgtttctccttccttgcccttcgggcgacacgatctcggcaccctggtctatagtctgactggaattcgggtcgcacaatgctttttcttgcagtttcatttccactctaccccccccccccctccccgatcacgacgttgcacgaagaagcgaaccaatacttacccatggcgacgccgtttcgagcgttccaaacttgccgctgaagttccagtccatagctcacggactgaatccgtgactgcttctcatcctcgagcatcgagacatcacgagcgtacagagcataaggctcatcttgggaagattctcggagcgattgctgacccacatatctcaatgtcttcgtcggattacagttccaccatcgccaccgaagatcttcagcgaaactagcgaagaaattcagaatgtttggggtccactgaatgaaacttcgaagctggtcctcgtctgcaaggtcaaaggaggtgagtgttctgtagtcttttgagagtcgagagaacgagacgcgtgaaaccttatttatctctagctctttgcccgcttcccctcttcagctttcggtcacgctcgcggggcggttccgtccagtcgcgtgggagacgacatgtaataatttgaatgagagcaagagcgcaataaaggatctcattttgacgttaagtccttctcggcgccttcggaccgactccgaggcagcgggagttgtccttccatggtcttggccgcggctctcccgcacttcaaactcgtaggacagtccgcgaggaagagagggaaaaaacgagaaacttgacgcacaatagcttgtagcaaacgagtgagattatgaacgtagttgtgcttctcccgtgtcattccggtgtcgtccgttgtcggcctcgagtagttggggaggcgagtcgagggacggcgagggggtgcgagatggaggggatcggggaattataattgggtcgaccactggttcttcgagtatgctggtgaataaatgaacagattgctggctatacatactagagagaatcatgagtgcataagccagcctcacgagcatgaattcgaagatggcactaagcggaccgaccacaagatgaagataaccgacacagttaggcaagtaagcatctcgttctcggtcagaaattggtcgtgggccgtatcagacttttattagacgccgcacagaaaccagcacttgttcccgttctccggatatttgggcgttgcccacccgatcctttggtggtggatcgttttgagatcagcgctgcgctcgcctcgacccgcgactaacctaagtcgttgagcgagacgaatggtcgggatgggtttgttggaatgcttagatcggttcagtcgccgagttaacaatcattcccccgaaaccccaacggtggctctgaggtgaaccccgctctcgtttgaaggtaagcccgcgcccagcgtgacatggaagcgtgctggtggagagaacgagggaaacgtgagaaccacgagaaccggcgacatcacgacctcagtgctgactctggatccactcagaagagagcatcacaacgctgatttcatctgcgaatctgcaaatgacggacttgcctaccactcggcgcacgtcaggctcgagctcaattgtaagttgtgctgataccgaatgggtcgttgatgaatgtctcgaggagaaaacgcaccactcaacttcgattttcgtgcgcagtgtctccgctgttggttcaaatccgtcgtagtgattctgctttgagcagtgggtatgacgcagagatcatctgcgaggtgtggggtagtgtgccaccagccaaggtttcgtggtggaaaaacggagtgaacctccaacaagatttcgaacacaccagcatgggtgagtttgaattcaactcacttcctcgattcacaccatacgaggaagcactgctccatctcaactgctctctatcctcagatggcaacttgacgacttcagtggtccgcttccaacctcgcgccgaggataacggccagtccttggtctgtcgagcggaaaatccccgtatgtcggttctgggagtgcgcgaagaccagtgggatctcaatgtatattgtgagttctttcggcgattgctgttcatcgaccaccctacgctgccttcgacgagtgcagtcaggtcaaacggtcgtgtcggtagatcgcgatggcagcagagccgcagtcgtgtcatcttgcatcttttgaatcgacgcaaatttcccgactcagacgaatcaaacagcagaatctacggcacggagaaacttccgttggttaggaactttgcctcggttggaatcaacattttctcgcctgtttcgttttcgagaaaacggcgtttcaagcagcggccgtgcaggagatgtacaatcctagccttggggaagaaggaggtgcttttgcttgaaaatggatgagcttatttcgcagcgactcggcttcactcgactcgtcttcagacagactctcggaacaactaactcaatgtggatctcgggttcgcccgtgaagtgagagagccatcgtatatttaaaaagaaaaccccccagacttcaacgttcttccgaggtttctctacctcctatcacttccccggctacgatttgtcgccgactccgcagcgctcgattgtagcaagtggttgttccgtccgtcacaaaagcattggatatggacaattaatgtttcatctccatgtttttcagatcgtcctctggtgcggattcagttggagtcacccggtcagagctccatcactgaagggagcgatatctccatcgcgtgtctcgtcgattccaacccagcaccgcatgggcccttagtgtggaaacacaacgagcacaagctatccgtggcgcctgggtctgggatctccgcgaaaaggaatcgcctccacatcaggaacgttcgacatgcgcacgcaggaaactacacgtgtgaagtttccaacaaccaggggagcggggtatcgtcaccgctcttcctgagaataaaacgtaagaaaaacagcgacgagacctcgctcttcgagcatacaagcgagacacagttcgaaggaaacgtttggacctcggatgcatccaagtgtggtccataatcttgagacagcttcaaccgggggtttctccacacccctggggggaggggtgtcaacaatgggtgattatgtcattattgatgccggaatctgttcgcatccgggaatgtttccgggtaccgttgaattcctactcaggagaaaatcggggcgaactggggatgcaggaacccatgaatctgtgcctcctcgatcagggatggctcggaactccagagcggtggaataatgtaaatactgtggaactgccgtagctgctttcgcctgcccatctctcctcgagctttccacctcgacttcagtttcttctctttcggaaactcaatccttcaagggacaggtctctccgcgaattcagccccgatcatctctggatcaaacggagtgagaacagattgagatatctcaaacagtagaaccggcaccccgacagcggagcgcaatgaccgtgaaatctgaagatggagaaaggaaacggggtcttcgaaattacgactctccgaactagacgcctcacttaacccgcgactgccgaccatccaacttggggtgtttattgcatctccaacgcacgaagctatctcatcgagtttcagttaatttcgtatattttccttctccgaaaattgacagatgttccgatgtgtcgaccgcatcagcgggtcgtctaccatacccgcatcggggaaaccattcccgtgagctgttctgtgtcatcacacccatcatcagtttcgtttcgatggaaactcaacagcacttcgaacgaaggcggtgtcaccacgtgagtcttcccgtttctctgagcgccacgctttcttcgccgcaaagacggaaaggaatgggtacttccgctcatgaatacacggggagggttcgagaggagaaaactcgttgtcagtcggaatcggtagctggcatatgggctaagcgaggcgccgatgggtttccttcccttggtctgaccgctccgtcgatccgatacagattcacctgggacggcacgaagagcgtggcgcagttcacgccgagagatgcaggcgatttcggcacgctgctttgctgggcgcgaaatcaactcggagaccagcgagagccctgtgcattcatcatcgtggattcaggtatttctgcacagcttaatcggataggagcgtcatttagcacgaaaaccgtcacttagaacttccggtgggaatctcgaagagtgattcagtgtgcgaacagtgctatgagaacttcgctgaggagaaatcccgttgtgacgaacggacttcaccggccacgcggggctcgttgctttcggcagcggggaggtcgtcgagtgtctttccgtggaaggaatcgttacctctcacaacttcaccaatgattcgtgggattgtttgtcttccccgcagaaaagccttccatcacttgagcaaataaaaactcgaaggtctgagacatctggcaagaatgctgaatcaaatcaaactgagcaatcgatttgtgagagtttgaagcgatgggcgtccggcgggacgtcgagggagaaaagaatttaagttgggaacagcttctttattgaggcaatgaagaagacgaaaggaggaagctgtccgcaactcgccaacaactcgaacaaggctcttaatcgaaacgaacaaacgatctcccgcaaactattagagtcgaacactgatctagagctcagtcgacgccctgctgcaatgattgattggtcggaaagaggttgacggtttgatgctgccccctcgactaggtcacgatcgggtggaagatcattcggggagcgaagattcgattcctgcatttccctccccatgacgtgttcattctattctgtttctgcctccgagtcatcgaacgtggtcggaagcgcattcttcgcatcgtcgattcgaagccttgaacttttgctcaccggacccgattgacccacgagttggtgtgaaccacgtaaaatacgcggccctacatccaggaagctcatcgtaatcgtcgtcggcccgatgctgctggtggttgtcgtcggcgccgacgaaaccgagccgatcattatcccgcttcaaaagctatttttcttgtgcccctcaaattcccgtctcgagttctatcctcgggccgggagctcgacaggggcatcaagacagagcgagagagggaaccccgaaagggagcgagtcggagtcagaatcggggatttgagcatcggcccttctttttttcgctgctgctccgacggccgacctttaaaaacggcgccggatgaatcgatttttgattcattgcaggagaacgactcaagagtcttccgatctatccttcccgtctaggttatccgtactgttccgtggcgtcgctgctctgcttcagagcactgtgttggatgctttcgtgctttggactttcgttcgttcagaagtcccgagtcagaagcgctgtgggcgatctttcgcatcgcacgccgtcaatgaggtcgggattccgaaagcgttctatggtcacctcattctaatggattcgatttcttgcagggtctccttggttggcggacgagcttactatcgcttcgtcactgtgcgctgctctggtactcatggtcataatcacgttcattataattttgaaaaaccgtcgccgcgacgccaactatatccaaggtaagcggtgctcgtcggatccggggccgagttaaccgaacaactaccctgtgtcgccccgatccctagtatttcggctcgtcgataccctcggacatcttgagcatttttgaaggttccgcttttccagaagcctgcgggtctggccatcccgcaaacgttccgaaagtcggcgccgttggtggagggtgcaacaacaaccaattcaacgatgcagctttcctcacgtgaacgcaatgtcgggtcgaccggaggaatcgatgtcaacaatcttgtacaaatagatacgaaatgtcaaacaatcaaccggaggtgaagaggctgaaccgaggcgggccgctgcaggacgaatcgacgaaaaagagaattcaccaactgctcctcggaagccgaccgacgcaacctgagtgaacggctcggagtgggaagaagtaccctttgcaagtcaaattgcaactaccttcaccataaggcagggcaatcagtgacgtgtttgaaaatgcgggacgaagaaagaaggggagaatggaaaggggcgagagaaagttcagcatgaggtgaggtcgtatcgatgaaatcagggtattccagggaactttggaactgactgtgcaacaacggcgcgttgcgagaggaagtagtcataggtcactagaaacttgtcttctctccgattctcctctggtctcgtcccgggtgaagctcaacgattcaacgatattttatactcaacgatgacaattgtttacatacttccgaatgagctctcagggttcagcagtatattcttccattcaatcaaaccacggatcaatcgtatcgaacgtgaaacccagatattcccgtgttgactcgaagacgtcaactcctcctgtgacagaatgggtggaaagacgacggaccatccaggctcccgagggacatttctggcccgcttaatagtttaacccaatcgatagtgaaatgatggtgggcgaagtaatcgaggtatttctgtcatgtagtgtataaagtcagaacagtcatgatgtctcgctgatcggtctgtcattcatccagtgccgcgacaatcattcgaaaggattgcgtgcgaactaataatgccaggccaatgggagagagcaagcaaattgataggtaaactaatcgactgagtgctcaatcggatcgatgatgggtttatctgcggaacgtgaggggagtaaaccaagtaatcgattatccagtgtaatgactggatctctagctcagtggttcatggagcgatcgagtcagtcgaagaatctatggaaacacggttggtaaatcgctgctcatggcatgcattgatggcagagtggattatgggattccgttgatctgattccaccctcatgtgtagatacagtgagtgcgagaggagcgtcgttgattggtttcgccgaaccttaaactcacgacggtcgacgctctcgtgtacaaaaggctacaattgggtgacagggacgtttggatgaagacgaaagaatgaggaatattatcgagatggtaggatcgaattgattaatgtatagttggacttgttcggaagcgactgcgaagtggccaaacgaaaacgaaatcgcttcgtaagcacgatggtcccagttggcccccctggctcggtggagccatgtgggtgattcccacctccgactcttcgtttattcattcgctgctctccctgattctacgcgcttccctcccttctagcgagagcgtctccgagcccgcattttctttggatattaaggaacccaacctgaatcctggaacctattcgggatctcggaccctgggcccaatcctggatgtctgacccctgtctcgtggcatgggaactaaggcctcccggtctctctctcttctcacgctctgaaacaaacgccgtgacgatttttcccctaccgctagacccagatcaactctattttgcctcgactgatcccatgcgatgacgacttgcgggagttaaaaggacacatggtgcctcctgatagtcaccgcaacgctggacatatcagctgtttacctaagacgggatgtattatgtcaatcaaaggatgaaagaatatgtgccgtttgaatgaataaagtgcgttgcttcgtctgtctgtcatccgaggaatcaaaacaaaagtgagttatcaaatcctaagaatttcatttgagaatcctgagcagctgaagtctccagtggaggtgtgatgagcgagcggggaaacgagatggactccactcgcgaaggcgaataccacccgcttccccgattctaagcaatggacttgagaataatctgtacatcgtatcgaacacaatcggggagtcgagcctttcggagacagtgttccttgtctcggtgcccttttttatacagaatcatttttcccgttgcgctcgttccctcttagctgccctcctccgattccttccgttcccaagagtttctttccgtttcggtccaatgcgagtcagtgagccgccagcatgattggaaggggtgctccaccaacatcatagctgccatgtccagagtaatgagcgtgaacgcgtttttgttcaccagaatctagtcatctatcacaagatcccggaactagtgggggtctgtgctgcgcgagctcagggagctgtatccaaaactgaagatcagtccgagcttcagtggcctgttcgaaattcggtagcgatcagatcagcgtctgtgcatcgcttcctagggtccattctttcagtctatgcgttccacaaactcggtcggactctcttcccggagcttccattcaaggcgaagaataatatttggctaggagttgccagtgaccggttggtcgaattgggctgggtcgtttcaatatgatctcgagttattttttcgatcccacatccttcccttaatatttaccctttatcgcccggtcgagggtgaacgagcaagcaatggagggccagagacaggagacgaatggatcagggggaggggggggggggagagagaatcgtcgaggtgtccgtgacgtttcttgccaggttgattgctcccacatggtccgctctcgattaacccgggattgatggatgcgatctaacgggagatgctttgaacaagatgctgggggaaggagttaaaatttaggaacttcttgttttctttctcgcgcaccctcacgtcgctcgccatgacaatcgctcatattggaaggacggattgtcgtgagcatggattacctcttcactaaaaacgctgagaaaaggactctcaacgttgaacttcttgcgaaagtgcgtacagaagcgtagtgcaccggcggacgagctggcaattctcgaggccaaacagatgaaggaataatatccaggatatccaggaataacttggaattgcgagccctgaggggggggggnnnnnnnnnnnnnnnnnnnnnnnnnnnnnnnnnnaacgatgtgaaaatcgggatcaggaacttcccgaggaggagatggagacgtatgggaatggacacaggaagactgagcccggaatgaggactgcaaggggtgtaagcgagggaaagagaacgggatgaaaaagggcgcaccaggacgcggtgagaaaggatatggaaaatcggtaggggaggactgcagaggggttcgggctcaaccgagggaacaggagaacgaaaaaaggggagattgaggagttcaaaaaggagatggctcgttcgatctgtggcgcttaagccttcggtccaccgagacatcgtccgtaaacttttttctgtcaaaggtgagaggtttcaaagaacggattagagagaacgacggcgagtggacggaaggacggaacgttggcaagagcgtcacgggaatgcggtggaggaggatgtgggagaaaccgggagagtgaatacaaatgttgtgaacgaagttctccgggaagaaccacatgaggttgatcttttgctgagggcagcgcactttttgagccgttcagctctgtatagaccttttacaccgatgagtcggatctcacactttcccaaagttcagtcttgatgggttgaggttcctcttctcctgcagtattcggcatttcctcccagacacatcacaatcttcgaataccatcttcacattctccccgtttgagaccgaagcggaatagaatcggtgtgagctattgcggcccgaatcaacaggagggccagtcttgatcgagacatgcgccatgccgagaagggggatgaccctccagggatagccgctgagcgttcgagagaatttccctcaaggatccagagtcggatagtgcggaacagattgggcagggtagggcaacggatcgcccgggagagtagtctgtacgcggactgtagggaaagggtgggagttcgtgaaatacataaactctgtcgttcgggtccaacgagttacctccgacatcccgactaggagagcgagagagaacatcagcaagcaacaaagtcagaatcgagttgattataaatgagaggtcgtgaaacgcgtccttccgggtgaaagaaagagtgagatgaagcgaaggagaggaaacatgatggagtgggggaaagaagttgttagaactgcggatactcgacatctatatgcgaccagccacaacgacaagggcgaaatcttgtgatggaatcgagctcagaggagacgcccagttcccgggacgaaggaggccgttcaagtagggaaatatcggaattgatcatcagaaaaaaaggccacatgaagcatcctcaaaccgctcggcggagaatggaccacatgtgtgttattgcgattgaggagaactctgcggacccaagatagcggcgcacaaaaaatatctcgcggtggactatgaaaaacatccaagcttcttgctctctgttataccctctcaataataaaactggagagaaagagcagccgaatcctgtgagatttgttttcatcgcagagccgctcttcctttccaatcctcctctccgtggtgctcagtctcgcgctccagcgacaatgccagtacagctgcttctgctggtgctgtttctgtggggttggaaggtaaccgcacgaatgttatcacatctgcaggctacaaaagagacacctccctgtagagcgataaatatactggagcgaagggagccaaacaactgaaggagaggaaaacgaaataaaggaaaaccttgcttcagatgcccgccgccggccaggctgcccgcgggggaagcgagcagctgccgatcacttgtgccaatcacagcaataaatgacatcataagccacgaagatgatggccgctgaacttactggtttgaccgcttcgtcggagccgtagtcgagttaccgctctcaatcggctgtgatcgtctcgctggcaaacggcggagaagatccgacgcggagtccaagagagcgaaactgtgagaggaatccgaacgaaaatctcgaagcgggactcgaagaggaactcaacagccgccactgagctctcccgctaagccgccaccccatgtgatcatccatgcgaggaatagacattttctcggtttttggtccgcgatgtcgtttgctcaagaacccgcactgacgcctccatcagggaataggaacaaaaaaacaagagaagcaactcgtcggccacgattccgaacgcacactgaaacacattgttccgccaaataggatcagctgcggatgagccgcgggttgagcttccgtcacacagcagcaagatcaagcaggttccaaatccgaatccaagttccgagatcgagcggtcccagaggcttcgagatcaagagagcatgaggttctgtcggaagctcatgaacgtcaatttcgtctccagcgaccggagcacgttatcatgtagctgcagactgtcgaagcatttccgaatgcctcgaggtcgatcgttccgaaggtctgcttttcaatcctcggttcgagatatgagcgatcgcggcttgtgtaccgacaacagaggcctcccatacttcccgcggcgaggtttcggtttcgtctcacgatctcaataacctccgtttccattctcacttacctccatcaagccaataatatcctgaaaagccagccgacagagtgtttgagatgttggcgagccaccaagcagcgtgggcagccagccttcgccatttctagatgatgactgcgttcactacctacaccacacctacctccgctgcccgagcacgtcgaatccctctccgaggaagatagcttagagcttttgttaccgctatatttgttctatcgctcgcccctccaagtatctcgctcggacgtttctcttctgacgaagaagatctccactccaagcggggtgagtaatattggatcctcactcctgataggaggactgaccgggtgatttcacagcatctgtccatgagattatcatttcgcgctgacaatgacgttccgctcaaacggaatccccaaggaaggacaagcgaaacatggacgcttttcgcgaatcctgaagttcgcactcaaggtcagcgaaatgcgatcgaggcgggctgacgaattggaatcgatgagaagtgagcatgaagaatcaggagcaaaaagaaaagatgatagacgactcttccgatatcctggggcttgaacctcgagtcaagtcagtcggcacaaaacaaaggaaaatcagacttgcatctcaaagaggggatatttgaataccccggagaattgagaacgagcttctccggttacatggagacatgggggaaatctgccgttttgtctcgcattcttcgtcttctttgcacttctgttgcgctccctcttcgtcttctcccttgctcctccgttgaggggaggccacggcccgcaagctttctgcgaccgacccgctcggcccgtagcgttttccggcgggaagccaaacgttccgattcagcgtttcctcccgtccttatcgacctcgctcgaccggactcgctgccaatgatcgatctgagctccgagatgagggactggttgcatatttctcccgctccgggcacgagtctttggcaggactcatcgacttcaaagtcttcgcaggggggggggggggggnnnnnnnnnnnnnnnnnnnnnnnnnnnnnnnnnnnnnnnnnnnnnnnnnnnnnnnnnnnnnnnnnnnnnnnnnnnnnnnnnnnnnnnnnnnnnnnnnnnnnnnnnnnnnnnnnnnnnnnnnnnnnnnnnnnnnnnnncgttgataacgaagtacggatcaacggagccagtgttcgttttgatagcggggtccggagtattttatgggagaaaatgaaagagtccaagtccggacgcctcgtggcgatagtgatgagcgcgagaggtgtcaacaatgaataagttctcaaagtccctgtcacagcagagtcatctgtagaggagagtatggatctgcggagagactgaaggggtggcgaagatgcatcctaatcttcaatagaggagtcgggaattcggtgcccaggagtgcgccaccattgacaagcgtgtcgagccgccaacggcaggaacgcttgctttctccttcggcagctcgctcccgtacggggggagcgaaagcaagcaatgagctatacagatgtaaattgcttgccgcgaggaagcagctattatacgattagcaatatggatagagtcagtcggtcccctcctagctcgtgtcccttcttcccgcctctcctcttcgtcccgctgatctacattcatgcggtagtactcttttcagcgtatgtcatagccagccagtcagtcgacaaggaggccgcccgctctcaacccccctctgcccacctccatctgcagacactggaggtcgcgctggtgagccactaaacagcgcggagtcagcgcagagagacggttcaacacgagcagccactgacgacagtcccgcgtgcgggtggcgtgagctttttttttgcgcaacacttcgtaatctctgtgattctcacccgggcatgaaattcgtggtgagattggttctcgaacagaatgccaacgacaggaccaactccctcgcggatctgaactcttgattccaactgttttgaccgagtcggatgtttgatagagatcgaagcgcaagagtgcaccgcacgccgcttcgcccggggtcacaagagaagcggaaaaaaatggggatgtccccagagtcacgggaatgcgacaattttaattccttgagttcacccaaaggttggcaaacgttccaggctctgggcacggggttattaatggcacatgtagtctattcagttcgaactccgatgaatccaacggtgtgggcccgagttttaacaggatttgaattagggaattgaatttgtcgtcccgcctaatctagctccgggtctcattcggacgagcacgccagtcatccctagatggaagcgtagcaacgctcaccccgttcgccatacacttgtgtccctgaggccatgagtccttcaggtaccgccgatcccccgacctcacacttccgtcccgcctcctcagcctcgccgccgctctccttccacaccacaaacatcgccacccctaatttggatcgtcaagtcatcgagtcacccaacgcaggcgccttccggagcgcttcggtgcccgctcagttgacgatagttgcgccgaatcaggctgagcctggaacttgagtccgacacccgataggcaattcagcagtgcgtatcttaggagtacggcttgttcgttcctgagcgtggtcgcccgtatcttcgactctgaagtttagcccacgcaaccggacaagcggtggactcgcgattcgctgcgattgggaattcggtacgcttccgagggttaaggaatgttttcaagtaactcagggcccggagccgatccatcttagcatcggcttacgttcggagaaagccaactttttgtccatattcaatttacatgttaaactagccgctgcagccgaagaatctatttgaatgttctcgccgctgccgtggctgctgccgctggtgtgtccgtaggggctttgagagaacctccggatgtaggggcaaaagaggcaaaagcgaacgagcgaaaacgagagaatctctgaagaaagaggagaaccactttgatgttcacagggctccaggagcgccgaccgaagccttcgactaacctcgaactgcagaggagggattgtctcgcccggagctcgagtgcaggtcccgtgcatgtccggttccagatttggtggtatccgattcattcgattacaagttcctccctcgagagatcaaaggaaaggtcatattcgaccttgtgggactcgattggaaccgggaacaatcctccgcggtccgagctatctccggcgtgcaccagaagccgcatgaggacatatctgaatatcgaactaggtcagcgaatgagacaagatccagcctaacgacccacaggaagactttctcgtctcaactccggaatcgcccatgaaggtcctgtcatttgtcagccactttcttctcggaggcaaccctcggaatgtcccagcgttacaagcagcgaccgagtcagtcctgttccagttactgtcctaggacgaccaggttcaaagaagttggcggcagaagattttcagagcagacgcgtcttgctgacagctttctgttggaaggagagaggcagcaacgcgaaagtggagagggtggtgaacactccacacgaaacacgttggaaacagctgatcgcggatgagtttctcgcggttcatggaagactgtcaggttttctgctgaagataagactcagcggtttcagttcgacttcgactgctatgcttcgcgacgatattcatccggagttcttgcaagggatcctggtgcgatttgcggtatccttctcgactgaaccatgaccactccacaactgaagcttctgagaagagcttatttagcttgtagacctttatcggaactgcgtgaacttcttgagctcgctagtctcgaaagtactgaggttccgagagaagcaagtatcgttgaagaagttatacggaatcctgtgtctaggaagtatcctccttgcaagagttaccggtgagtcctcaccatacccacgtcgcaacggtcgatttcctggcaaaagcatgaaaacccaggaatgactcccggatggcggagcatgctcatggcttttgaggtttccctggaacgatcgagtcatagactgtgcacatcggagagcccagatccaacacatcgcgttcttgctgttttcaatttcggactgttttactctgtttcggccccgggcgctccaattcgagtgttcaacatcccgagacaaccatagtaaagacccaacacttttcagattgggtgtcatcaagctgctgatatcgttcctggagtcaaatctcgaacttgttgatcatctctacgaagaattagccagcattgtggctgattcttttcaagatgactcttcctacatgagctacgagataggggatcgggagttccaatgcgtgactctgagagaaacccgcgctttcgtaactcaaggtgatcacccataggagctgctctcagctttggaattcgtgggattataaaatgcgatattcattgcaggctccactggtttccgcagctggccagccgccaaaattcttgttgaagtcttgctcaatgaaaaccttgaaaaacgcagaatcctggagctcggcgcgggaaccggcttgacaggtctagtgttgttgaagaaacgccctgatctggggtcatacacattcaccgattgtcacccaggggttctagaaactctgaggcagaacatagagctaaacttggggtcgaacgattcgaaagctcgggtgcagcttctagactggcgtgtgggtggatcagttgacgcggacctcatcgtcggttcagacatagtgttcgaccgagacattgtgccgtcattagtggaaacgattgttgacgcaatacgccggaattcctgcgaggcgataatctcgagtgtgatccggaacgaagaaacttatcagatcttctccgaatccgttgaaaaagttttgcagtgtgaaaaactgaccgttagtcacttcaaatatttcgaaagagtctccgacaaatacgaagtgatcaaactgtcgaggagaaagtcgtgacctgaatgtgagaataaactgtggtttgtgagtcgggacgaatccagccaaacaggcgattaattattcaaagtcgctcattagcatctcggagaccgttccagacctccggcgaatacggatttcagctgaaacatgaagtcgcttctcgtccctggagcggatcgaccgcggaagtgttcctgtggcgagccgctcaccgccgccgcggacagggagacacaatcgagggagactcggcgacacggagaaaagggagcactcgagttatgctagccgcatccgtcatcgggatctcactcaattctattcgaacaattacgacattccgagcccacgggctattgtgcctccgtagccgttcatatcgtccaggttgtgagccagggtccgaatgactgttcatcctcgcctctattcggcgactctatttgctcaaaattcaagtccgacacttggtgcgctctcacttcaactcattgtcgttagttgtttgcgggttctgctctccacgcgatagactctgtctttcttattttcatccgttgtccatacatgccaagcctcattgtgatcgtcacagggacagggtcgggtgaggaagtggaagcaaaactcgcagaacgctttgctccgagctgactctgacgagggtcttcgatcgcgttcttagttacattccgtcgcaagcaaactccgcaatcgtgtggagtcggtgagggacgagctcaaaacgcttcaggctgtttgacatttgatcaaagtattcaccaatcatctgcctcggcagctctcattggtgccggcgtttacgcagcagaaatcgacatttcgaactgaggtagtattctccagagggaagcacgcgtctttttctccttccgactgtaacttgacttaacctccgagttcgggctccggtctccgtttcgaagagtatcggcacactgtgtgggatatttcctcgtgttcacacctcggcgtcggctttgctacgagctcgaggccgcgctacggcccacgataacttcggagcccccgtcccctcgaacagaaagaaagaaacacaagaaaagcatttctacgtgtgagcgaggccgcatgccacgttcagaagcttcagcaaccggcatttagtcagagttcgtgtttcagctcgagatgatgcggcggtcacgtcgacaaagtttgctccgaggagtgagcgagccgagttagcgaacgaatcccctaacggaccaacccggccgccagtggcgaagatccaaaaaaaaggaagaacgaaccctaacaatcatgaaattgtgaattgcaatcttagttttgtagaaagagggtgaaggaatcggaagtaagcacaaacaatgttcggacactagtgcggattcttttcagcgttcgaggtcccggaggagtcaggaaaacaggcagaaacagagggagtccgagggagcggggaagaggaactacgacccgggccaccctggctaacgcgcctcagctgactgaccacctcttatcgcttgaggttaagctcggggattagattgctgaacggtaagacatcgctaagctgctaaatgacgctcaaatcccaccaagaaacggaaatgcaaccggaaacgcgatgcatcgccagcagctgcccgcgttcactttttcgacgtcgtttacttcgacagggtaagcggcaccgcgatcagagcatcagcttgaccagacggctgttgtcggaacgtatttcgaacgctcgattgggagagtgaggcgactctggaacgaagcaaggcttgtgtacaccggggatctactcatatcgttagtgtccacgttctcgatgagatagtgcgaaaaggtaaaccatgtgaatggaacagcaactccgagaaacgtattgggtcgtgcgacaggtggaaggagtttttttgtgacgttcgcgggcgcttctcatggcggagcggattattgatgactcgaaacgggctgctgggtgctctacgacgaaggaacaattgtttcccaatcgttagttaaatgaatacccaagatttatgactgcggcccaactcctccgaagatccgtttcgccgagggccgaagccaaagtcaggccacgagcaccgattcgattctgatgaagcttcgctacagtccatgctttgggcgtcggttcagcctcgattctcccgctggatgcctttgtcacaaaccggtgtgtgctctctcctcaacgggtcatcgaaggtgcagagctagaaccgggagccacacgggaaaaagagaccgcaagattcatgataggacaggatcgcagccgtgcttgtagatggcgactactaaccagacggcttggagacacaagtcaatgtcatttccctcggagcagaacgggagaaaaacgggcgtgagagtatgagatgaggcggaggacagggagaagcaatcttgccacttaaacgcttttccttttcccataatgcagcgggaagaaggcgaaaagcgaaaccaacgaaattacattattattcaagtagggaagagaagaggagtggcaggaggttttctctattttcatcaaacggggattaggcctgagccccacgtcagcctcttggcatggcactccgcgctgtcgtcgttgccgccgtcgtcgtcgtcgttgccaccgtcgtcttttgcggccaatgccaagagcccccattacagcaaagcccatgaaacaccgccggggccgagactcattcacaaacgcactcacacaccgaaacacaagaattctccgatggcaggacggtgctttgcagcggaggtctgttcaactcgatgacctagttgcgaaccttgttctagtcccgtaatagcttcgaagagtgaggactgaaattacccacacggtctcgcgtcaagttctcatcgacgtggagtgagccgtgaagatgtatccggctcgttgaagacaggttgccgttttgaggttgcgtgcgtctcagaagagccattcatcaaacagctacgcccttgtgtccgacgttccttgggacgccgatttactcctctcgccagattgacggagcttctcgatatccacccgagtgctttggcggagagactggcacttgatagccacgatctactcggacaaaaaagtaatctattccgtaattaagacacgtgagggaacacctggtcatcaccacgctcaaacccgttcgaaccaacagcgtcttcgcgagcttggaccctatgccaaaaatcaattgacaagcagccgacggcgacaacagttttaggatcacagtctggtcggttcacgcaatcacggcgagagacgttgaagccttatttcaacaattttcgagagaagttcgaacgactcctttgatacgtgatcgttgaggagatgagacctgttcaggctgaaatcgcgcgttaaatgtcgcctgatgttctgagtactccggcagcgatcgaacgaagattcgtcgagcgagcaacagaatggaagggagacagagcgaggaggaaattcgcgacttcgattgcctcaggcgcgctcgaaagctaatattgacaccggcagacttaaaaaaatcgtagctgcagcttaatcaaaacttgatcgagtttacaataggcatggaaacttgatgtgcctacgtagctcaagggcagtgtacacgacctcagactccatggagccaggcacagtagtgaagttgtacagttgccattggaaagttggacaaaccgaacttttgattccggagctccgatgttccaagggctcggcagatgagcttccggttggcgagaagcattttctcgcgacatcgaatccgaacgttcattgtctgaatgatgaaaacgaatgtagagcggggacggtcgctaacggaaaactgtatatgagcgagcagggtccgtgcgaatgttgatttaggatggtctcttggaggttacgtcaaacggaagtgtcgaagctgagagaaggagacgaaaaaaaaagcaaagcacggccacaccttcgtaagtggcaccttgaacagtcatcaggacatactctacgcgagtcagcaggacacatggacacggcctgctcgccgtcaggtcacccccagtcacgatatgcccatcccgtggattgacaacggctggcttctcagatgtttcaaaaaaatattccgcctgattcttaacgtctcgagtcaacgaggagaggacggccctcgttccggcggcggataatgggacatatcctgcaaggattcaaggactatcattcctcggcagaacatcgtcgttgagcaagtatgatggctgcacaggcatcagattttgtattcggctggatgctgggtccggctcgctcggcaccacacggatagcttgaggagcgagatcatctcccggagcttcatatatttcttcggttctcccgggagcgaaatgaatgacctctccgagagagatatacgctgtggacgaagcattgattgttcaattaccatggatagtagcagaatcgctgggacctgaaagaagggtaaccatggctcgtccttacgcgctgcgattgaggtggggtgagacagccaagctcaatacatcaaaaagattgtcccgtagggaacatcttgaacacacggccctcctcgagctgccggcgccgccgccaacgttgaaagagtcttttaagcgagggtaaccggtgctctctttgaacacccttctaagctcgacaagttattccgtctgagcgcgaatgtcatccaagtcttttttcggggtggctgagagagaaaatcaggattcttccccatttccgcgggacggctccctcttagagaacaggatctcctcgcgacttctagcttcctctcggacttggaattaatacagttttgaattcaggtatccggagcagaaggaacacgactgcggaatgcctgatcgggagtaggcagccgttcagcagcaatccatggaaacatttgggagaaatggcggtaactcatggtgggatcgaacttgacacaagacttggacggagaacaactgaggcgatggtttttagagtttgatttgtagccttgcctcaggccactggatgggctggaggcttttttgtgactcatcgatatcccctggaggcctttccttatgcactgacacaagagggaagaaggaccgtggctttcgctgcttttttgtattcgagcaaatgcagagagtctgcgagatacatattttccatctcttccgagacaacagtctcgacatgtgatgttgttatctggcctgtttgagctcggcacggtaggttactcttcgcaagcctggtgatacgctgagttggtcgtccgcgagcaccgattcgtttggaatcgctggattgttgcgtgctctgcgaacagagtgtactggtgtccgagaggctgtgggaaaagatgtacgggactcctcaacgggacgacctgataagtgtttccgcgaacttttttattgggtatccagaaaccgaggaggctctcctcgtatccaggggaacgcttatttactgttcgaggacgcccatttctgagcattaacgaaaatttggagccacggagaggctgatgcgttcctgtgcttcgcatcatctgaaggccagtgagcgcattgccatgggaggaagcaacgctcgggatgcggcattagagccaagtgccgtccgcagtcggacgacaggccggcgatggcgttcggcgacccgttcgggttcagcggatatacctgcggaaagaacggggtacggcatcccaatatgaaacagccaggcttgcgcaacctctcgagaagagaatcgtcgactcacctgggttggagctcctttatcatcgacgtatctcacggtcacgagatttttgttttcacaagcggccatcagttcggcatcctggaagtcgaagcgcccctctccgtgtgccgaccagactcccataacggcaccctccatgcctggaaaaagtcgatcggtgagaatttcccaacaatccgaagaagatcgcgggaattcaactcgattcagagaaaacaacactctgcccgatatccgagcgcgaaggagtcgaacgctgccacatctaacctttcagccaaatgttgttggactcctctatcctgacgttgctgtagcggcactcgaatctgccggacacgttctgcagcagcgatacgcccggctcaccccgtttgcccggacaaacccagccgaggagcgccatcaattgacagccgttgcaaaccccgagcgagaaagtgtcccgtcggttcttgaacgtttcgagctgactgcggagtgcgttgtgatacttgaagccggcggcccagcctcgcgccgaccccaggacatcagcgtacgaaaatccccctgggaacacaaggcctctgaactcgttcagcgtaatcctcccgtcgaggaggtcggtcatcgtgacgtcccagctctcgaaaccggcgaggtacagggcggcttgcatctcgcgatcactgttgacaccttcctccctgacaacggcgaccttgatgttcctgttggcgattgttcttgttggtatctgcagcgtgatcccgtcggtcaacgcatacagcggcgccgtacgggatttcaggcaacggcgctcctgggctgcgcagtcccggttcgtttgataattttcaagctcgaaactggtggcctcccagatgtcgcggagttccgcaactccggactcgattttcgaggctccacaagttatgctgatcttggctttcggtccactcgtggtggtttctccgatcaggacgcattttgtcccgacgccgttgtacgccctcacgacagcctcgcagtcctctttcgctacttcgaggatgaacccgacttcctcgttgaaaagggcggacacttcatccccgttgctgagaatgttcagcgtggcaccgcagttccccgcgaacagcatctccaagacgcacgtgatgacgccgccgtcggacacatcgtggccggcgagtaccttcctctggtccaggagcttctgcgtcacttcgaacgcattcttcaggatctcgggttgctccagatcgcacactgtgtcgcccaactgcttgtacacctgggcgagcgctgtgcctcccaagcgggctttcccgggcgagcaggacacatgaaccaggcacgaagaggttccggcccaaggacctttgacgtccggagtgacggtgagggttatgtcgggacaaggcgcgtagcaggacacgacgatcgtcccgggggacttgaccgtctccgaaccgactctcgccgccatgctcaacgagtccttgccgccatcgaccgcaatcccgagagccgccatggtgtcgcacatggctttgcaggcctcgacgagggcgccgccctctccgggaagcttcgcaggccacatccagttgccgctgcacttgacgtccctcagagaagagatcctcgcgaacatcaggttggtcacggcctcggccacggacatccgagcgccggccgatgggctgagaatacctttcacgggctgctcaccgattgaggtggctccgccgactttgtcgaagtacgatagtgcaacgacagcgacatcggcgagtggggtgtgcaacggccccacgcactgctgctgagccaccaagcccgtgacgcagcgatccactttgctcgtgaggaatcgcttcgaagctacggcgggcaagcggagtacgcggtgcaacgcgtcagtgatctggagtccggccggaagactcagaggcttcaggggccttttgtagctgtccagcttgaacgttttgctcggcatttgacccaacacgctttcgaggtcgaggtcgaccgggggccgctcctgtccgtcgtactcttcgagaacgattctgcccgtgccggtgacctcacccacgaagttgactgggcaccgttcccgtctggagatctgctcgagaactttccggtcttccggcctgcacaggatggcgtcgttctcctgatattccgcaccccatagctccatggtgttgatggtgggatctccgagttggaactccttcgtgcgaatgatggccccggccggctcggatatctctttgagaacgttcccgttgccgccagctccctggtcgtggatgctctggatggggtttgcatcgatgcctcgctctacgcaggcgcggacgagccggtgcagtttctgctccatctccgcgtccccgcgctggacggcatcgaagtccagcttggcgctctggtccccttgaacaacgaccgacgacgccgcgccgcctcccaccccgatcctgtacacgggcccgccgagcttgaccaccagcatgcctgtcgagagtcgtaattagttacttgcgagaatccatctgaaatttcggttcggagccacagctcctgacaaacgccgtcgccggttattgtcagcacttgagtaaaaacagctggctacatggacattttcgtacacgacattgaatctcgtcactgttccgctcacctttctccggagtaactttggtacaggtgtcttcgtcgatgcaaccgaaaccagcggagaacatgatgggcttgacaaactccttacgttctccgttggccaacctcatgccgaatgatctcgagaaacccgctagcacgggctctccgaacttgttgccgtagtccgaggcgccgttcgatgcttcaaccgcgatttgcaggggaggtgcgaaattcgggggatattcccacttctcttcccacgggaggtcatatccggggatgtgcaagttgccgaaggagtaaccggccgttccggcgatttcgtgggatcctctaccggttgcgtgcgtgtcccggatgcgaccaccggtgccggtggttgctccggaaaacggtgctacgccggtcgggaaattatgtgtttccgccgtgaaaagcaaatgacgcgttttgggctcgattttcagcttgctaggcccgcaggggtcgtccggtatccagacctgggtgtggtagccctttatggccgaggagttgtcactgaacttgatgacattgttgtcgttggacttcttctgggtgtcttggatgatttcgaaaagattctgttcctccggcttaccatcgacgaccaggtcacccttgaagaaccaatggcgagagtgctcgctgttcgactgcgccaagtcgaaacactcgaccgtgctcggattccttttgagtttgctcttgaaaagatttgtgtagtaatccaaatcccagtcgtcgaaggccaagcccagctctttggaacatctctccagagcggatcttccctgacccaggatgtcaacttccgaccatgagtccggtttcacatcgagctcgaaagaagtcagcggcttctcgtagatctgttccgtcattttgtcgtggagagcctcattgagcttcgctgtcagaacagggtccttcgcagaacatctgatcaggtaacgaacgcatttttcgattcgagtcacgtggtccagtccaatggtttggcagattccgacagcttgggtagagctcggagtttcaaaattaagtcgcggcccgacttcgacaatcagatcgctgggaccggcagcctccaaaggctgctcgtgcgtgggagaaagaagccatcggagtcgttctgtttgctcggagttgaggtcaccgttgacattgacgtagtagcacgactcggtttcgaggagctcgacgacgtttcctccagacaccgacttcaagttgtcctcgatctcagcgtgcttcgcggccggcaccgcaggcctcgcgaagtagcgaagaatcaccatgacgctgaggggatcttcgaggcggcttgtggaagacacggaataccgcgccgcagtctccgcaatatcttcaagaaagagcgtatctctgcactcgacgatcgtcttcgacgctggcgccgctaacggaaaaactccaaatgtgtcgtaggtgtcgccgtggggatgatctggaatatcccaaactctgaaatcgcgttttcgaacgggaatcgtccagaacgtcatgacggctcatgttcggacacttgatattggatttacacggctaaataaaacagcagcgtaaggcccggcgggaacatccgttcgtcgcggcccatcaactccgccacacacgcggcagagcacgctatccagattgaaagacgagattacaccttttggataagactgagcagcgattagccgacatgatagatacagatctcttttctacgctgctagacgcgtgtgagggaacccttgccactccgccgtgctcagtatctgccatcctcaacactcggtctggcgtctaagctgacacgctacggaacggaatctctgaccacccatttttttgatatggatacctgggaaagtcggcgagcgtttgaatattgctaacaaagttcgtgggatgcggcaagggatgttccgaatgaactttcgaagatgaccctgaggtgaaaagttcccgaagagttgccacgagcgcgcgaagtcactctgaatctccagcgacctcaatatgcacatggagagagtttttacaagtcagggaaactcacatagaagcacgtttctctgactttaacgtgaagtggtccaatgaacagtgatttcgggacttcggagacgcggtatcgaattcgctttcgtggttaaagtcttctggtttctccgctcaaaccttggaataacaagatcggaatcagctgagaaagccatgaagcagctgtagcaggaaaacatcgcggacttctgagagctgggacacgcattcctgacagaaactcaagtcgcatgctgctcatcattcccctcggaatgatgacggaatcattccccttatccgttgtcacgcttcattcgagattcggggagacattggagctagggtaggagcgggtatcattttgcgtttacatcgatatgtagagtcatcgatcggaatcgtccgccgcacccattgagcattttggagccgtcgatccaacaacgggataagggtggaggagaaaagccatgcctcatttgctgttacttagacactcaagcaaaatgggagaggggagggatcgactcggtcatgcaggcacgaagactaacactctcaaatacatccgcgtgcacacgctcacattcaacaaagtgtgccgcaggcacaatcagattggattcacccttcactgggactgaatcacacccagaaagcggggttggggggggaagttgggcgagcaaggggatattgagatgcagggctaagggccgatagtttttatggccatcaacagcagtctagagctcctcgccacgagcgctatttcgcgtcgttcatatccgtttagtcatcgtgccggatactaaatggcggagtggtgttgaggaatcaacgaagtcggtagatcggtcattccacatcaggattacaaccttaacgaagtagccatgctgaaggcaagtgcgattacgtcgttggaaagacttttggctacaagagaaacttctccttctccttccttctctgattcattgctcatatttcttcacggtcctccatattcctgaagagattcgagatatctctagctcacttgttgtattgctgccggaaatgattccaagtcaaacttcgtgcagctccactccacttccaaccccttggtccctcggcgcatcgatccctcctgggagcggtcaagataatctaaagctaactccaaccactcgaactcgatagatgctcccgtcccgagctgagtgatcatcgaagtcgtgaagggacgagacgacagaaattctccgggaaaaagaaaacttcccatcaagattgagtcacatgaaagttgaggtttggtggggagagttcaagttcgctgtcggcgacatcaacgtaaatgcccacgacgcgcttgaggagaggtgaaatcagttcgtgacttcaacagtcgaggaggtgctcgattcctttccgagaccacccaagttcaaatgttggcaaactacggcgcgcgagagtttgaagtgtggcgaaactgcagaacttggtcgcggtagacatctacgagtgaggcgaggagggaaaaaatataagaaaactcctgaaggggcaattgaaataagaagattttgcaccagatcctcgactacggaggaggcatggaaggcgtcagggaagaggccaagcaggtaatcgagttatgagagaagcttcctcggcgctactgccactactacggctgccgccgccaaccgccggaccgaccgagccaccagcatgccagtcgaccagccgacagcgagaggaaccgacagaccgagcgaggaagcaagaccaactctcccagatctccggggtaagcgtcaactagcactaccggctcggcatgctcgagcgactagccatattgcgatgggctttatggcttctaggccgccatcaatgatgggaacgggagccgcagacgacgtgcgagaaagcaccggcaagtttctcgcggtcaacgtacactgtacagacaccgcgtaatcccggagaaagtgcggcctactgagctgtgaccaaacaagaaccattgcagaaactagacgacgcttctcccatgttcgatcccggcctcagcccggtccagtttctgcttattttctactcccagctcacggttcgtctctcatcggacccgcagagattgagcccacgagcctccagcgttctgggcgtccggacgttaggacgctcctcgattcctatcggcctaatcgagcagagcccgcctgtgaaggcaatgttctacacccgcccattttgctgattctcaacgctgtcgtttgacagattcccatggagcaccgcgttgccggactttcatcgaggagtttcgccaacaatcagggaaaggagttcttcttgtttcctacacgaacggccgacccgaacgaacacccgggggctacacggctcctgcccagccgaaaccaaacagggccaagcgggcccgcgcagggccaaacggagccgagtagctcatctcgcaaatgggggaatagagcgaaacggcgaactgagagaatgatcgttacgggaagaagtccctgcaatgaagacgaatagaccacaagctccacctgcgagtgtaaatgcggatgaactccgccagtcacctactgcgcgattgctcttttgagtagaaggaaacacattttatcttcgcgaagagcaactgagttcgaaaatctctgaaaaattgaagaatcgctccatgaatctgcccagcaccatggccagagcgtccactcttagaaacgacaatggaggatatgaggcatcgagagcaggacccccataacaccacatacaaaaaggaggcactggatttcagtctccagttcatgggccaagatccattctttcggaggattgcgtccatcctgttgcgaactcctgactattaatcatggtaatcgagcgggacgacctacgaatggtttctcaatgtcgtggttttggcagggaaagtcgcaggaaacgagaattgatcaataggtattcgtgcgggatccacgttgccaggacaacgcgctacaacagactcttgcgcttcctggtgaacatttgctagccgtggttgtacgtatcgagtcaaactacgactcgtttcaacacctcgatgagcgttgaagcctatgatcttattttccggacgttgatcagctcgctgaccccgtcaccatgatgctcattctgaagtacaagaatgatccccattacaagttctcggtcgcctatggagcaacgccgtggaatttgttggttacggcctcactgtggatcgcttccggtattctgtggtatttcgagaacgtaacactagccattgtaggcctttgtctcggcacagttatgtttgtgatttgcgtcatcaactcagccggggacttcctccgagagaagagtgtccgccagccggcgaagctcagcagaatgctctccagattggattggctcactccggtaaggttctatggactgacctgatgggccgagcgtggggtcggttccatctcgaaacgtttgcactcggaagaaacacggaacgaaaagagaaaggttaattttgcttttctgccgacggttcccgccagaaaatgccggtgaccgagaagacctgaatgcctaatcaacagtatctgtattctctcatgctgtttgccctgggagccggttccactagaccagagatccgattcttgtttcattgatgaagtcgaatgctgtgcttgttgatcaggttatccaaagctgtcagaggtaaagaggaataaaaacttgaaaggaaggccaccggagaacaaagacgtcgagggaggaagagaagaacgcgagagaagccgatgtttgctcgaatttcttctttggcaggcggtcccttggccgtagagagggaactgatgaggaagcctagccatgggttgctagcccagtgcccccgaagcgctaagccctccttaccgagtgctaactccggcacggagactcctgctccttcctaaaatggcaatttgaaatgcatggctagcttgggtcagacacacagtggaactcctttgtatgcataggaacagcaactgcacacgccgctgccaccaccgccgaagcagcagccgggaactaatgttgcactcaaaccggcattaacttgtgaaccagacaaggcttgcaaaaccgaagcgagatcagtctgtcacgaataacaaaatgaatcttcgaggctcgagcccattttttgctcggatttctcatcagcgataacgaaggagtggaccctggttctcaatagttcgcaagacctgacgcatgcccgatcagacattctaaatcgccccgttctccttccaggaacacagtgaacacgtttcccctatgtcatccgtatcggtgtcggcatcttgtctgaactggtcggaaagtgggactctactcgatccaaagtcaggaatatcggcatcgtgttgcgaacggatcaatgtcatacatggctcagaacctctccatgtgggagttttagcgttgagcaattcgagggtcttcaactcgtgtgatctaaccgaagatgctgttcgccagcccttgatctgatgcaccgggaaatcaagggcagggatcattcgcgaatcaaacgcatctcccttttcctatctcaccgacgaggaaatcagcaacagaacgacgcgtttcatggtcggtctcatgggcgttttcaggagagctttgggacgttcctaggttccggtcaggtgcacaacacgagccactgaaacaaaatttccctgattcatcgagaccccacttgcttcaacggtttgtgtgattttcgccgaacccgtagatgttcgtcgatccagacggggtcctcgactcggctcttacgtgtgtatagaacaataattattgaatgtatagcctataaaatgtacggcgccccaatggtggatcaataatgttgtgcatgttcaaataaagaatcgatgcaattctccggttttgacgctttcgacggtgacgatccattctgactagggcagggcgttaagtttcgctggaagtcgaaactctgagaaaaccgatttctggaacaatagaaaaagtgcgaaagcgatcggccgagcgcgagccacgaatcagtggtcgcgcaggcaaaggtatcgagacggatcgacaggtgcgcccactctttctgtctctctgccagcacagttcacatcggaacgtatgtttcttttagaatgtgagtggagtgaagaccatcccgcgccaccgcccgggctggaagtttagaacccagaatcattcgcctctgtacgtttcacggtgatttatggccgaaatgccgagtagaacttccacctctgatcatggccgtaggcgaccctattcaaggcccccagcagcgcatcgctgttgccaaaaccatggataggtgtcctttcttgataccggcgcaagactctcaatttggtcgggaaggtcattggagaaagaaccgtaagcgtggagctccaaggggaggaggccccggatcgtctccggagtgagcatttcctgaagcgtgctccacttcggaatcattcgaaggtttattcactcatatcgagtagaattctatacaagtaaaagtatatgaaagtatatacgcctcttcacactgcacgctctgtccagtcatcagtggacatcaagtccccgtctttccttcgtacctctggagtgtgctaagacattctattccggggcattcgctcgcatgctactttgtacattgtccgaggcatctcttacagatacaatctgatgttgcctcgtggaaacccaatgtcatccacttcggaatccaagttgaatccttggcatggagttggtgtcagccattcaattcacttgaaggggcaggttctcacactcttcaactccggcgattgagctcggattgggctggtagcagctacaatgattagatcctcgcctatccctgaaaagggtgaccaagccgagcgttcgcttcggcgccgacagcaagatgcagactgtgtccctgccccattggacttccttaacgcccgcggaatggatccagctcctatcagtttctcgcacgagtaagggagatttaaagtacgctttgccttcggctggcacaatcaaacttcaactctggaaggatatcccattgcatcaattcggcaaacgagcttccgcgaccccgcgaatgaagatctcgctgaacagtttgtgctcagagtgaatccaagatcatgaatcgcggttcagaaacgacattgaccgcaaccaatccaatgtgggtttccgccgggttcttctttcagccgctcgaactgagttcaaatattcgcgggttccagtcgttgggcgccaaaacagcgacagcagcgccctctgtgtgtttcgattgagcgccattttgagaagtagtgtgtggcgtggaatcctgctcattttccgtgaattacgagttcaggttggacttgcctgcatcaggcagccatgtccaaccccgtagtaaataaggatgccttcaacaggaggatgaaatctgtctacgaggcttggaaggtaaatcatcggccggctccagcctgcactcttccgaactccctcaatggtagaaggaattaacgctcagttcgccggtagtgcattgggcagcccccgcagccacaggtttgatgtaaccgatccggaggacaggagcctgattgctgtcaatcgcggaggaatgagtcgggcaagacgttacttgaacgagagagctcctccgcgttcgactcatcccgtccacagagctgcatggcagatctgatctttgctgttggagctggggagtatgcatcaagtcctgtctggaattcgactcgatagttcccagactccaggcaaccagcgtttcttggtggagccgccgtgatcgtggagcgcctcctgtggtttctcggtggctgtcgttcgagaagtttgttgaccgcagcttggcacctgcatgcatcgtggtcgctagctcgctcccaggcgtcataggtcggggggtaggctgcaaacctcgtccccagcctcatagaagtattcccttggtaaatcttttggtcaaaacgaatttcacagagtcaagcgtgttcttgtttacatcggggccagcggatacaggagggagagaagctctcgattcgtaatacctcaggtgctgtgaatatacgggctaactcgggccatttcttcttttcagaacggcgacaacgagtaccaatctctggccaaatcggatgccattgtagtggttatcggtcaagatgaagatattgtgtactcgaagagcacttcgttgcaccactatttattcggttacgagctgtccgatactctcatggtcctctgcgagaagcagatcatattccttgcttccaagagaaagattgaatttctcaagcaaatcgagcagggaaaagaaaacgagagcgaactgccacaggttacgcttttcgtgcgggataaggtagggaaagcgcctttttcgattccccgagtatgacacaatccgggatccacgagattacgtgatgaactcaacgaattcaatccgacagggcgacaaggatcaggcgaacttcgcgaaaatcaccgacctgatccagaagtcccgagaagggaagacgctcggcattttcgccaaggacaaaatgaactctgagttcatagacctctggaaagcagcactcgcgagcgccaaactcgagtacacggtggacgtgtcgcctgccttcgcctacatcatgtcgctgaaggacgatcaagagatcaatctcacgaagcgagcctcccagatgtccgtggatgtttacagcaaattcctccgacagcaaatcatggaagtcatcgattccgacaagaagatcagacacaacaagctgtccgaaatggttgaagaggcattacagaacaagaaatacgttggtcagcacacggacactagccaagtagaaagctgttacccctccataattcagagtggagggaactacaatctcaagttcagtgtgcagtcagacaagaacacgctcgatttcggaacgatcgtctgcatgctcggggcacgctataagtactactgctcgaacattgtccgaacgctcatggtgaatccgtcggaggagcagaaagagatctattccttcctcgtgaacttgcaagagcatatcatcgacaagctgagagacggcgtgaaactcagtgatctgcataatgagggcatgaactatgctactgaacacaagaaagatctggtgaagaacctcaccaaaagcttcgggtgagtgaactgatttggattttgtccgtagggtactttccagctgatgttccaagaaactcgagcccctactcagcacattctcgagggcaggcaggagaagattccctcgactcaaccgaagaatgcaaacttgattcagtttttccttgttccagattcgcgatgggcatcgagttccgagagagcagcctgtccatcattccgaaagccgacgtcgtagcgaagaaaaacatggtcttcaatgtatgtgtcggtttagcagatctcgagacctctgacgggaaaaagtacgcactgtttgttggtgatacggtcttggtcgccgacaaagaccagcctgccgtgctgcttactcaaagtaagaagaaggtcaaaaatgtggctatcgttctcaaagatgaagacgaggagtctgaggaggaacaggacgacaacacgaccaacaaagaaaagaaggccgaagagctactgggccgaggcgcccggagaaataacgccatcatggaatctaaacttcgtgcagaaatttcttcggaggaaaagcgccagcagaatcagaaaattctcgctgccaaagtcaacactgaggctcgccaccgtctgactcatcaaggagacaaaaaagttgagcagaaacatgggaaagcagtcgtatcctacaaaggtgtaacgcagttcccaaacgagcctgaagtacatcgtctgaaactgtttgttgacaagaagtacgaaaccatcttgctggctgcatatggtgtcgtggttccgtttcacatcagcacattgaaaaacgtgtcgcaatccgtcgagggcgattacacctaccttcggatcaacttcttccatccgggtgggggcgcattaggtcggaacgagggttcttactttcccgaacccgaagcgactttcgccaaggaggtcactttccgagccagcaatctcaaggagcctggagagctctcgtcgccgtcgagcaacctcaacatggtctgccaactgatcaaagctgttcagaagaagtggaagacacgggaagccgagaaacgagagcaggagggcattatcaagcaagacgctcttgttctttcgaacaacaagggcaatcctaaagtgaaagaaatcttcatcaggcccaatattcacgcgaagagaatcatgggtgctttggaggctcataccaacggtttccggttcacgtctgttcggggtgaccgcgtcgatattttgtacaacaacatcaagcacgctttcttccaaccttgtgataacgaaatgatcatcttgctccattttactctgaagaacgcgctcgtaatcggcaagaagaagcaggacaacgtccagttctatactgaggtgggagaaatcaccaccgatctcgggaagcatcagcacatgcacgaccgagacgatctcgcggctgaacaggctgagcgcgacatgaggaacaaactcaaaaccgctttcaaacagttctgcgagaaagtggaaagtatgaccaagcaagaggtggagttcgatacgccgttcagagatcttggcttccctggcgtccctggccgttccacggtactgttacaaccgacctcaggagctctggtacatttgacggaatggccccctttcgtaatcacacttgaagaagtcgaaatcgtccactttgaaagagtgcaattccacttgaagagcttcgacatcgtattcgtgttcaaagactaccatcgcaaagttgctcaggtcaacgcagtgccgatgaatatgttggaccatgtcaaagaatggttgaactcgtgcgacatccgttacaccgaaggcctcaagtccttcaactggaataagatcatgaaaaccataaccagtgatccagaaggcttcttcgacagcggcggctggaaattcctggatacgcattctggttccgaagatgagggcgaagacgacgacgacccagacggcgaagatgaagacttcaatcccactgagtccgaagacgacgagggaggcgacgaggatgaatccgactctgaagattattcttcggaggaagaaggcgactcggaagaggagtccctcggatcttccgaagagtctgggaaggagtggtctgagctcgaagaagaagctcgtaaggctgacagagaggatgaagaggaatctcgggggaaaacgaaggttctaacaaagcactcctcgaagcatgggtccagcagtaaacaccattcatcgtcgaaacactcatcgcccaaaaagtctcatcatgtaagttgtagaactaaggtttttgccaccaatattcccagatttgaggagtgaggagaacattgaggtgtgttccacggatcttcatcgacgagcgtcgaacgtactaagatatttgaattgtttcccaggacaagtcaagcaaagacaagcacaggagtccccataaatcacccaacaaaagtaagaaacgtggtcgtgacgacagcaagggacggtctccggataaaaagaaacacaagaagtgaatgagctctcgtctgttcttctggtatttcggttgggaatcaggccaagtttatagctgtataaatacatcatgagggagagttttatgcttaaattgtaacaataaacatacacctgtgtacacttgccacgatcgaattcgagtccttctcctggctgcccgatgggatatagggttcaattattatatcactcaagtctcacatggcttccgggctctcagataatagggcttcatcgtaaataatgatcaccatcccccgaagatgttctcagagcggccctagtgagcttaaaacgaactctggagtctacgaacatctaatcgaaacagcggctctcaacctttcatcgtggaagtccatcctccggtcgctgccaccgtttgaaggcgcttcgtattatgagtgacgaatttcgatgctcagcctcgtcctcgaacccgcttcccgatgagccgatagagcttcggttctgtactcgagggctgcggatacgcgacgagtgcccgaatgccattttggtatcgacccggccaatttgatatcgtttcagagcccatgttgatgaaccagcttcaaagcgtctctcattggaagcgggcgtaatcttgtgagatggttctctttactctgtcattggtacgttgttgcgtattcgcctgtgttctgtggtacacaggacttgttatattaggcactcctcttgaaatgtgtttcccgtggcgcgtacttctacatttgtcgtcattcgctcctcgtgcaggtgtggcggctacgaggagacaggatcgagggattgagagcctgtttggataacgcagctcggtttccgctatcagtgctcttctgtttggtgatgattatctcccgtgactttttttcttttcaaaaaggttggagtgaaattggtcttcatggcttccgagccggcacgtgctgctatttctccattctcctcttctctctgcttacccttttctcgttcttcgctcgctttgaggtcgacctacgcatccgtccaggggctctcatccccctcgacgggtcccatggggccacacatttctcatgggcaggacgtgagccaaccgttgctcgcctccttgcggaggccgttttttctgttctagtacacttccacccaagccgtgcgcccgccgtttggcgttctgtgcgttggctcgctcgttcggactcgtttctgagcttcctccatgcacgccggtttatgtttcgctcgggtactctcgcggacgtagacgccgggaaactcttctcaggttccctctctcttgactaaatgctgggcattggggctcggtgtgttccactctacagggtgtgtcctcaaagctgcaacattttcgtggccctcttgttgcgagctgtatttcggccaaattttacccgatctgggaatttgttttgatcggaagctcttgaagagacgcatctttccgcatttttatttttatgaggaccagatcagtgtcacgtattccagcgctcgccgaagttttcctcaattcaatccatggcccctacaagagcttaccagggaatcgccgattctcaaccaatttcggagaataaaaagagaacgcgcagatcggttgcgaaccggagaaacggtattcaatacgagatacccccaaattgagccctccagaccccctgccgacctctcccgtggagaaccgcccgtaacttatcaaggaagccagatccgaaaatttcactgatggcaaaagtttcttatttcgagcaaaactacccggaaacgaagcaacggggtcgatctgataacttttttttccacctctcaagtcaccgggcgcttatctcatgtccctcactcgccgacaactcggaaggggtcaggacggctttgacgagtaacagctcggaagaggcgcatggaatcgaagttttcttattcgaaccaggagccgtttgccgcgatgacctcctccaacctgctgcgggggcgcgttttcagtcagggacgtgagatgagcacccagtgacttttgaggtgaaaaaaaagttatcggatcgacccggttacttcgttttcaggtagtttggctcgaaataagaaacttttgccatcagtgaaattttcgaaatcggcttccttgagaagttacgggcggttctccacgggataggtcggcagggggtctgcagggctcaatttgggggtatctcgtattggataccgtttttccggttcgccaccgatatgcgcgttctgcgcgagcgttttgtagctgagatcgagaggaatctttccgtttttcattttccgaaattggttgagaatcggcgattccctggtaggttcttgtaggggccatggattgaattgaggaaaacttcgacaagtctggaaaaggtgacactgatctggccctcaaaaataaaaatgcgaaaagatgcgcctcttcaagagcttccgctcaaaaaaaaattcccagatcggatataatgtggccgaaatacagctcaaaacgagaaggccacaaaaatgttgcagcttagaggacacaccctgtatattccggcccgggatcgcagtggacacagatcggcgatggcgccctcccgaatcgatattttggagtccccattggccggaggacctgcgtgaggtggaacgtgagatgctctatatcgcacaacctgctgagatctgggatgcgctcatgagtcgatcttccttgatcagaagtagtccagcagtgctgccaggtctccatcgtctcttttctgtagaagtgtttcttcttgaactcctcatcttcgtcatctgacctgttctcggtctctgacccctttcttggctcccagtttctcttgagtgcaaattaagggtggccagttttggtcgggaattttcgagcccgattttgttttggccataacttcctcagttctcgggatttcctcgaaaatcaaaaagtgatcgagaggggatataaggcggctcgagtggatatgataaaaaattggggtcaggaaatggttttgaaaatgacccattcttcttccgggctctccctaagagtcatcgttaggaagtcgatattcatcctatcggagtcgtaggggtcgcgttggacgcgcgaaaggaagccggtcattcgcccaaaaaccgatcgaagctatctcatatcctcggaaaatggcaagcgatcgtatccacccttttctcaagggcccgcccgtaggctcatttcgttctcttcggttcccctcgcaattcctctcgtaactcctgaacgagaaggaatcgaaaataactcgtcgggtggaaatcactcaaaaagaggtgaatcatgctaatgttgagctttcgtttggttctccgtcctcggtcgccgaaagcacccttgacaccataggaattcttgatacgatcgcttgccatttttcgaggaaattatataagttcgatcggttttcgggcgaatgaccggctccctttcgcgcgacccacgagtccgatcggatgaatattgacgtttccacgataactttcagagagacctcgaaaaataaaagttggtcgttgtcaaaaccaaaagggccagccgggatgtgcgccccaccgggaaaaatcgatttttgaaaccttgattcataactcgagagccagtggagccacagcgcccataaaaaaacgtagtgaagctctcatcaagagctatcgaatcgagtcccggaaacctcttttccatccgtcggttcacccggaaggagaaggctgaccacttcctcagatatcgccaagagtactcatctgatttatgagtagctctcaaccgatactcttcatcgtctacttgcagggaaagtttcatcccgatgcgattttgcggggtcgagatatcaacagttgaacatcggcgaggaagcggtttttccttgaagcgcagcataaaaatgaatagaagttatcggatcaattcatctatgtggaaataatagtcagatggatcccggaatcacgcctcccagacccgttaaagcatgctcagattgctcccaggatcacccttccagacatgtagagtcttctcagattggtcccagcagcaaccccattgacccccagaagtatggtcaggggtgattccgggaccaatctgagcatacatttccgagtttgggaggggtgagtccgggatcgatttggggaaaaaccgcttcaccgccgatgttcaactgttgataactcggccccgtgaactggcatccggatgaaacttgctctacgagtagaggatgaagaggagtactcttagcgatatctgataaagtggtaagccttctccttccgggtgaaccaacgagttttcaactttcctcaactgaaaatgaggtttgcaagccccgcggcattcgagcttgagaagagcttaacaacggtttctcttccagcgctgtagctccactggttctcgagatatgagcattttgagttttcaaaaatcgatttttaacgtaaaaacgttttcatcgaaaaccttgaggggccagtctgagtttgcgtcgtcagtcaagggacgaaattcgttcgcttttgaagccgtacaacttcggttctgtcgaggatagaggactcccgtgtgtcttgaaaccttgcaaatttacggtgaagtcttgtatgagattttggtgttgttctgacgagcgtaaatgagtctgcagcattcatttgtctaccccctcgagaatctggaaattggcacaaataactgtttcattcggttgcgaattggtgcgagagagcgggtttctcgggaagtgggcgattgttatgagttagttccgagtcggaactaacagcatgatttaacgacagaaagactgctgtgcctcttcttcaacaacagggatgttgaagcctatagcagaaacgcggttcctaccacaccaaccacagagatcagcattgcgtcggattcttacacgaggtacagctcggggtgcatcgcatgaaatttcaaaacagtggcaatctgccgtgcagtatcacattcactgcaggctatccatgcaggctaacaatgaacatatatgtggaagatggattggtaaacggagccatacgcaagccacgtcacgttgaacattgcccaagttcgtgtgacgacaacgggtcgaaacgtgtatggctagaattcgacaccgactatataggacgtctggaacggttggaatacagaccacatatccgttccatatcagaagctctcaaagagcaatgggtaccaatcgaatcacgatcagcaagtatgaaagaacaaactagaataaaatgtagccgactccaattcccgctcttgtcagcttgcgaactaacaatccataagtcgcgagtaggaaccttcgatcaaatcgtttgactacgaagagaatcataggcaacaactggtttacgtgtctctcagtaaagtgacgtcgcttcaaggccttttccttacgaatcgacaaattcgtttttcctcatgtacagggttccaagagtccaacaattcgagaattccggaactgccgtgtgcgctcaacgctgtgacaagaagggagggggatgtaaaataaatccaatccaatccaaaaatgtgcactgtgacaaggtgtgaaggattcggcgaatgtctccaaactcaaaaatcgaggatatgtaccacttgctgggctcttctttcgaagctcgggtcattcaggagtcctttcccgattcctacagcaatccaatggagaaaaagggaggaatgatgagcatcccggggtcaacagtgggtccgatgtaggaacaacttggatgaatgataagcatgcatcactgagagcctctatcctttgattccaagtaaagatcgccgacttctgtgggcactgcctcaaattgggggattcatcctgtacttccggaaactcttccgatttcaaagcttctattcagctgcccagcaccgaaagctctgagtgagaatttctcactcaccgggaacaggtcccggcaaagtacggattcatattccaagtgtctaggagcttgagagtgggcgggacgagtttccggcgttttctggagaactcaagagaaattgaattcagagaaattgaatttgctcgtagacaactgtgcacgggactcctgtccatcgaagccctgatgcaggcttcggagcgaaaaattcagaaacgtccaaaagaagccctctcttcgcatgccaatcaaagcaaatctgtcgattgattttgaaatccatgaatctgtcgaattcttgtcgacacagcgagtgattcatattgcttattgacctctctctgctctctgaaagctgctcggaaggagaaactccgtaaaggccgcactccgcgggactgtcattgctaggaggtcgatcgttgcaactgaaagcgtgcggacggatagtcgattcgcaaactctcatggaggcttcgaaatatagaaccagtttcattgttgagtgtttttttctcgctcgaatagggaacacaattacgggatgtgttcttcagacattaaggtagctccgcgaagtaggtgacgacgcatcgacgacaatcacagccggttcgctcatggaaattacaaaagattcattgtgagagcctgcgtgctccagcgatgaagcgtgctagtcagtaggctggattcacgtcgagagccttgcagccggcgcgatgcacctccctcctgacagcaaccgttcagtgcggaacctctcggactcagtggacagtatcttgaatttgattccgttcgtcctcggggtggagggatgcagccaccgatgccgttgtttcgtgaggtgtatcttcgcgttctgtcatgtctacgccacggtctattcgactgtctactgttaccgcgaattcaagtcaacgtattcatcttcgatcctcaaatgtgtagcttgcggagcctacccttacaagagtgcacattcatacctcatttatgtgtggcgcttacgagtaggcaggctggagagatcgaaacctcaattggatggcccggctgccatcgcattggcaatgcttcttttcctcccgattgccatctgctacagcctaacttatgcgcccgtacaccaccggtcgctccagacaggcacagtttcattatacgagtcgggcgagatggcgttcctcctatgtcaagttttgaatgcgatcatatttgttgagatggcttttgtcctcagctccgaagcagaccgtatagaagaattcttggataccggggaagcttatggtctagggtgcacacgaataacctcgaggtgcacccacctcagcgagacattcgaattccctctcaatatgctccacatattatacttcttgcgacttatcactcagattccggtcaaagtcgtcctgatttcaacttacggcttgagtctctatgacaagctgtaccacacgcaccaactggttgaatttctcctcgtcgtccgagccggcaataagatactccagatccgccggaagttgcgaaaacagctgaagaaaacacctgagttcttctcctcacgagtcagcgtaactcaagccttcgcgaaacatgactgtggcatcactttcgctctcggcagctctttgagtttcaaatcgttctgggacttcctcggcttgaactggggtttcacgttcatggttatacagctaggtttgcagtgagcagcttgggagtaggtggccgcaatccaagcgggccaaccacgtggagcacattccctggcaagtccttgttgatatcatgctcgcgtggccattctgcggacgaatccatcaattgcgaatctgaggagttcagctctgcggccatggaataaggtgctttggagcaacttctcaaacgaggaagagccgtaatcactcgatgctgtattatcgagagtgatcttgaagacgccggaccgccgttacccactttccgagaccggtccaggtttgaataaaagcggacgcacagggttaaagaaggtgaggaccaaccactggaaggaagacttggacggaaggttgtccctcgactctctgatccgattctctcagcaaccttgcttcctgtagcgatgaacatggctgagttttcatgatgttttggctccagacattgcacgaatggtaagccggaattcagcagctgaagcactggagtacttcagactatcgagaaaacatttttttgtcgagataacgatcaaaataggggtgcgtcgaaattttccggcagtgctggcttatttttccgtgttattccgaactcagactcgcgttgtcgattcaccccagaagccacgctgattattcatagttccgcaacctgtatcaagaaaacgtgtccgatcggcatcgttaatcgggggtttcgatctgcgaccttcatccacttcgcgcgcagctgtttctgaggtgcgaccaaaactggtttgcgtcttagttacaattcattcttcaaagcggaggggaggcgaaaagagcgtatacatagattaacataatggcagctctctactgttctttcagattatgatccgctcagacaggcggtcgatcgctgctgctggatgccgacaaatcggattcctgagctgcaatatccaatcaggcgcgggaaaggctgaggagactctctgatgttcatgcggaagcaacgatcggtacaggccaagtgccctctcacctggctgacgcttgcagccgaagttatgcactcagctcagagctggaataacgagcctcgcgagcgtagtctcccagcttcggggagaaccgcttcgctatcggtggattgcttcttggatctgattccgtcactcctcggcgttggggcgcgcaggcaccgatatcgtcatttcatacgaaggtttctcatgttctgtcattcccacgtgaacttgtattcgagtgtgtactgttactatgcgttcgatttaacgtgctccgcacgtatcctgcaatgtgtatcatgcggcgcgtacacgtgcgtctgcctgcaatggctacttataaatataccagccggcctttggccgactggagtcggccgcgctgcgcgcggttggacggcgttccctgccatcgaggcacttttctctcccttcactgggtca

SEQ ID NO: 88 - DNA, 64875 bp, Phytoseiulus persimilis
  source 1..64875: mol_type = genomic DNA
  variation 30913: allele = a; note = SNP_21
  variation 34950: allele = c; note = SNP_22
  variation 38409: allele = c; note = SNP_23
  variation 38458: allele = a; note = SNP_24
  variation 42427: allele = t; note = SNP_25
  variation 42604: allele = g; note = SNP_26
  variation 43158: allele = t; note = SNP_27
ggggggggggggaactgcccctgcaggtggacgaatgaatatggaacaatggaattccgtaggccgcactacgccgccgtgagctcggcgccaattgcactcaggcctgctgctccagggcctcgtccgtccgttcgtccgatgaaccagccagactcgcgtccgacatactcctgaacccctgctccgggaccgccgtaatccctgttgcacaactcctcctcgaacagagactccggctgcgctcggtgagaactggatgcgccgtcctgaggcctatcatcccaaagataatgatgaaccctctcagtgcctgtcgcaaatggttccgcagtttcaacgtgactggtcgtctcgctctttatcgctcccccccccctccctgggctactcgtctcccctcgtccccgtcttcgaccctgttaacgcctttgtgattctgtacccagtgatacatcgaggcattcgagtccgcccgctgggagacggcgttcctcgaccgggttcaaagtagggtcgacggcagcccctcggactccatcacagggatagatcgtgccagcagctgggggttcactcacccgtggacgaagattgcttccccgggcacctcaaagctttcggcctccagcgagtcctcgccggcccttcatcttgaggtgaccaccacgccggtgttgatccgcgtcgaggccttttcggagcgctcgtcgtcgaacacgcaatcggatgttcaaatcgcatgccaccttgcgcgagggctcgaatccgctcgtccgttgacgaccagccaacggaacgggaagagctccgctgttcgctaagatagaatgcggaaccgtggcgtgaaggttgagattctgctttgcctaccatagagagtcagaacaccgaggactcgatctcccggatcgagggattctgcgtgatgctagcaggatgttagcatcgtggagtaatcatcacccagccaagtcagtgaatgaagcgtccagaccatcgcgcgatggaatcatcggtgaatcgtcctcagtcgactgaactgaaaaatgtgcggtcgattggaccggaacatgatcgactgatgaacttcatcggacaagtacacatgcgctcgacgctcgtgtcactcgacacaaatgtagaggacgcccgacaccataaagtgccctcggatcacgatcggccgccctcctggttccagcatcggacgatgtttttcaggtgcagatcgacccgcgccatccgattctagctgtgcggaacccgactctgtcatctggagatatccatcgtgacaaagccctaatagtcgcgatcagggagagggcagaggcacggagtatcgatctcggaacgttttggaaggcggcgtcggagcgaaaagcaagggcttaggcatctcgctaactccgttctgacgttgcaagcgttctttctcctagcaaccagctccaatgaactcgcattctccttgaaaagtcggccttcctctcggccttcccagagctattcctcgttcaggggacaaagtttgaaatgtcagcgccgccgcttgagcagaataagctcgactccagatcccgcccctatcgcggcgaatcgtctacccccccccccccnnnnnnnnnnnnnnnnnnnnnnnnnnnnnnnnnnnnnnnnnnnnnnnnnnnnnnnnnnnnnnnnnnnnnnnnnnnnnnnnnnnaccgtgacgtcgaagcgagtcgacagcctgcacagtgctgactggctcagtatataagctcggtgtccgcgctcagctagccggctgttgcccaattagaggaattgttccgtccccagtgtatggattatcagcgggccgcttgtcgttagagaggtatcccgacgttagtcttcgctgattgggctccaagaaatgctctctgccaatctttttttttgtatgtcctccttcaaagcccggaactggagcttcgggtccatgtcccaaagtttttaggtccttcaggggtgaaaaacataatggattttccgaccgactgaaaatcgtctcttaaacagctcaattccattatctcctctgcgtcggggcctacaatcacaaaagaggccttcgatgcagcgctcgatgatctcagctgaaattatggagcggtccaccgagctctgacgggtgagatcgccgaacggtcgatgtcgaagatccgcctgaatccgtctccagaactgaggtggaacagacctggctcgaagaaattactcccctctcaggtcgagtttctccgctggacacgagctgtgggagctcgaccgccggctcccacccactggggtcctttcgtcaattcgcgtccccacagccttgagagttgctcttccctccagagaatcggagccgctgttgacctggataggccgcgtttaataatgcagcactttccatccttgttttcagtagagcgaccggcgcaagaactcgtgtccgcatcagatacccgagctctggctccgcggatgtgcaggccatggagggggaagctcacgcccgccaagttctgccggcggccttagcaacaacggcggcgagcgaaaactacgcaaagctcggtaatgtttgtgtccccgtggactcgccacgacgaagtttgtcggatcaaaatgagcagcaacacggaaaatccatttagcgcggaatcagttaacgttcatgccgaagccgctgctggcgctcaggttgcggcgggggaccgttaaacggaagtccgcctgagcgttaggaacacaagccaaaagaggcttccgcaaacacggctctgatctgcgctgtcgacgcggctgaaactctaaacctctttcaaaaaatctaactccagtgcgggaaaccaccgcacgttgattgattctttgtcagacgcttggtgtcctttgtggagcacggagctctggaatccgagacggatacggaacagaatacgtgacatccccaccgcaacggtccggctgtgaaggatttcgaagttttaaaaaaaaaatcacaaaggcggaagccctctagcggagtcctcgactcctcggaaatagaaagtcacgaggaataatcgccgtcgtcatcgttttgaagagctctctcccaaccccagacaagagttaccgctgccgagacacggggcaacgggcagcaaaaacgaaactggaacccccactcgtggcggaattcgacgtcgctcctatcgggggagacgggccacagtcgcagtggtaggcctccgcaaaccgaaacggaacgggagaatcgaagttggttcgtttacggtggaacagaagccgaagggcaattataagggcgaggtgagtcaatatggacgtgagcagcccctgcttccgccacaggagttcagagaactctctccactcctgtctgatcgcaagctcggaacgaatacgcgcctggcgacgaagacgtacgcgttcgtgtaaatgggacgacgagaacaaatttctcgcggtcggaaaactcgagattaagctgacctcgggaaacggcctgacgatccgccagggccaagacgtccgcccagtcgtcaaagcgagcaaagcgggaactcaaacacagaacgacatgagcgaattcccgctccagaccgcctcattgtcccctggcgttttcttaatttcaggccacttgagaggtcaacggaagtggctcagagtcgcatcaggatccagccacggctcgagctaggctcctcttgtacggaggctgcgcagatggccctagatcatggtaagccctaccgaaacaagccggagggatgaggagtcagatatgctcatctgatgcaacttcttctgctccttcgtcgctcgctcaacagaccggagcgagcgctgctcctcatccctaaggctcgaacaacaacgttgaccgcatcgggaaaacacgcagcggcgatcagcagcagcagagtttggatcgttctccgacgcgggtagttggctctgagtcgatcccgatgccgctcccgagaagcggaagcccaaccgggggtaatgacgatccggaatggtctatctggaccgatctctggaagaagaccaaacggtttcatctctgtgacagtcctgaagacctaggaatctatccctcaggcatgattcctcctcccgacatcccgacctgcatcgccgggaagtcttgtagaccctcaccgaggttggaatatttcttacagtttttccgaatcgaacggttctcgaggtcgagtaggttctccaacgagcaaggatgtcagtggcttcccaatcgcttggcgaggcagtacgcaaagtggctcagagttgcccgtgaaaaccgcaaacaccgaggaaacgagccggttgcaggagagcgggagtgttgcaaaaccgggagaggagggtaggtgcacaagggggccgcaaacgagaaacgtagcaaccggagctgcaccaccaaccaccaaaccatgtcttccccgaccgaactgtcgcgctgccgcaaagcagacaagacgcgttaattatttgctgttggtcctgtgttctttccgggcctgcctttctttcaacatgtctgtcgctacattccgtctcgtttcgggattttttcctccgccgtctcgactcgacagccttcctctctccgagccttgatttcgttcccaacggcccctctcctgggaggagtaccacgatgccggttatcgtcactgctctatccctcgatggatacaccgactggaatccggtctcgattttcgcaggagttcagctccagcgggattcgctccagagctcccggagctcttccctacctcgtcgaattggactcacgccggctcgccgagcacgaacgaaagagagggggcagccagttttcaggatgttcgacgagagggccgcaggagatgggcgctgaccgctccggaagagaagaggatgaagaaaaggaacgagttcggtcttttcattgaaacggatttgatttgacgaccatcacagccaccaccagatcttgttgcagcgctcacctcctgcatttcccccggcgaactccctcggctccgtccatctgtcgttctcttgatgtcacagtggaccactttctcgtcggagtgaaatcgacagcatccacgggagaaaggaggagcgacgagaagagcttgacaacttttcaacagaccgtgtcgacttttccctcagctgcggcagcagagaaaaaagaactcattcgttgctctctggtcgcttcaggagaaggtgggaatcgtcgatgaacaggaacgacaaattgctttcactactccggtttttcctgcgtcgagtttgcgctcagacccgggagaggcttttcttgcccgcgagggagaagtggatgtgaagatggcggcgatcgaagcggtcggcctctgagttccgaaccagttcacctcgaactcgaatccgcttccccgttcgaattctccggcgttcgggagcaactttttctcgatatggattatgtcggaacccactgcggaactattctgctgcggttgccgtcgtcgacagccggaaattgagtcttgcaccttagttactgattgctcaccattggttgcaatcgctccgccagcctcacaccgctagttcagcaagcttggtccgcctcattctctttttgccttcgctcgaccggtccctctctcgttccctagcaccttcgaatgctattctcggttccgcatcctgcgtgggactcgacgcctttctggttcccatcgttgtcgcatagcattcgatggaaaagttactaagaagacaatgatgcagtaacaggtggggggagtacaattggtcggtggtgagagcacatccttgacgaccatgaggagcccacatacagtcgacaaaaggtcacgatttcattcggttgcgacccccgactctacttggtcaaccgccgacacactcggcttttgtaagagggcagcaagatggcacagccgtcattctcgagcggtgtcccagaggactaggactcgacattgttctcaagtccagatattttttttttcccggacagagtacaaccatcacgttcatccagaacctgcgtcggatgcgttgagaaggaaagaactgagttcgaaccttcgagtcatcatttctgatgtccatcagtcatggcaaggcaacaggctacgattgaaagtcctcgatcgggacacgcagcctccccactcctgacccttcaacagagagaggccaggacacgtgactgagcacatagataatgttcgagagaacgcagataaggagttaggaggaagggggaagaaggaaaaaacatctcagaccgaaaacgaccccattatcttacacccccgattttccacgtgggtgactctccccataggtcgcagcggaaacggactcctcacctggaatcggaagaacgtaggaattaaacgttgccgacgtatctgggcatgagcttcgtttatcgttgagtcgatagatgttgacgtgcctggtttcctctcggtcgaggaacaaaatggctacgacttatgataatacctaattccaccacccggattccccagtaaatctaccggaacaaaaggctataaaaggatcgctttcttccccgaccgatcctgtgcccgttcgcctctctgcttcttcgnnnnnnnnnnnnnnnnnnnnnnnnnnnnnnnnnnnnnnnnnnnnnnnnnnnnnnnnnnnnnnnnnnnnnnnnnnnnnnnnnngttacgcgatccagaacttccttttagtgtcggttggaaacaatttcccacaatgtcaactcccttcccgaatctctgattacaagtcaccctcggcccgtttggggagctgagtagtcctcgggagcggaaggcaggaagcacggtcggtgttcatatagccgcaagttttgttctcgctcgttggaaagcaccaaaacctcatttaccaaggagacctgaacttcccaagcttatgatgatgatgcggattcgttttagcgtctgaactcattcgagtgaggtaccttcgtgagttggtattgcgattccacttcgccctggcagcgctccccgacggagcgagacgactatggtccccgctggaatctcaagatacaatccctaagcgttcccagcaaggtcaacgtcatctaaacgagaacagtcatcagtcgcaagctctccatgaggaactctgggagcgtttcccccagggcgacacactcggttcagtgccgaatggtttcagcattgaagaaatcaagtcaggcgcccataggagcgcaatcggagaggtggtcttggacgacaccctggctccagctgaggtctcaaccattcacccgcatcggggggtccctcgtattcaacgttgcgcgggaatcctttgcaacctcgcttagcctcacgaacgaggcaccaggcgcgacgaacacgagcgcgactggcggtgtgacagggccaagtgtgctgggggaagagaaagaaagaaagaagattcattgaatgtacgaaagtattgtccccttggcggtggccggtcggcagggccaccgaccgacgtcatggtggtgatggtggcggcgggtcccctcacagcagtgtgatccatctgcctgtgctcttcgtatgcttattattgcttaggagacttcttccctcgcgctccagcagcgtcccgctcttggatggatagccaaccattagtagaacgtccgtgtggctcactcttagctgcgggctggatggctggcgggcagacggacggacggccagctagatgggtatggcggctgctgcagctacgtcacttccgaaggctcctattttccgtcttctctttcttgtcatgcggtgatcgcacaccagcaagtgagccaccggcatcgccgcttccaacgaatcgggcagcccaagaagcacgccagttcggtcgccaggcacaaagtgagagcgatagacagagtagggaaaccatcatttcttcaggtcgtctatcatcgttaatgcctctgctgggagactggtcttgaggatgttcaacggctcaagaacgttatctcattcacagaattagctccttgtctctcggccagctccctcttttcgtctccgggaaactctctcctcttctgagctcgtcctactggttcccaataacaagcggctcaggagtagcacatcaggagcgagctcacctcaccctagatctcaccgacttcgttcctcaactccgtttcctccggacgaatatcccttcttcccgaacgacaatcctcgatagcataatcgaacttcctccaaggcctacggaaagagaaacggaggaccccgactattgggttcgaatgaacgcacgtacgaagagtcttcgctccttccattaagcccgtcgcgaggaaatcaatgtttatccgaagcgccgccatggacgaggcacttctgtcgttgctctcgccccctccccctacccgaggggcgctctaaatcatcaaggtgcatcaggtatgatgttgctgtgggctggagataacaacacccacaagcctccggtaccagcccgaagagaacggcaaccgtgagaggaaattttggagaaaagcgtcaaaggtgggcctccgaccgacagctaccccactcgataccgtggtacatgccgatgtggttgtggcaccacgtccgacggacggctaaaatgactcggacatctcaatgatcaggtccctgttcatgagctttggggagctcatagagttgattcgtgtgcaccaattagccgagtgtttcaatgccgaactttcgctccgcactcggacagttgtttcctgatggatggaatcctgatgaaatttccacttcgaacacttagcagccctgcagatcattcggggacccctcagagggtgcgcgtgattccatgccaaccattgttctagccatcggaagctcagggtcacggaggttttgtaacttttgctgatgctctcgatagcgaaggatcggagccgatcccctcatagatgaggatcgatcgttgcctcatggatggttcaaactgagcaatcgatgagatacctgttcgtttcctctccgccctcagatctcaacgaaccgagagtgatgtgagaattcgtactgagctgggcacacaatttgaacagttctcgaggtggcatcgagcaactcctgcgtcgggagttggcggtcacaacaagcgcctggcagtcccatcaatcaaagctgcgggattggcccacggacatggagcaaaggtggatcttcggatggatggttgggtcataaatccaatcgcacacaagaatgcatagctaatagctcccgcaacggaacatgttcggacagagagacgtaagcgaacgaaaggacagacgtcgacagagagatgagagccacatcaacgaagaacaaacgcttttctcgttgctttgagtaagattacgataatccacaacaaacagcggaaggggcccgcgatgggatgaattcagggctaatgatcactctcggctcgaatccttctgctcttaaccgatcgaggcactacgacgactgtcggcgatgaatggatgatcatctgtatcatgcaaaataaacccagtcagtcgttcgcatcgattcaggcccgtttgggcactgcgtttcagtgaccccgttccggttcgaccacgaggacaacaacaaagcttcgctaagcttccatcggatctctttgccaaatgagaggtaacggacacaactctcttcctctaattaggttcctcctgttttctctcagttatctcattgttcgacgtcgaggcggtacccgctccatcatatcattcattcttctgtgaaagattcggggacagattatgcgaccaaactgaaacgacgagttgacatcaaaacgtgactccagccttcattgtgagctccggacgagtctggatccaattccattgagtgttcgggttccgggggacgacgcacacgaacttcccagctcccggctgagatccgacgtcgatgttttccccggttggcgagcgcatcggtgatccggctcgatcgccgatgttcgccttgaaagatcagctgtttggagagtggaggttgtcgttcgcatccaagaagccccgcttggcgagataacggtttctcagatacaatgttcaagatattcttgtgttcggtgatgtttcatcgtgtgaactctgagcgttgtgcaaagcagccttgaaagaaagcgtcgaaaacaaacaaactctgggtgcctgctcgtttgttgttcaatcgatctgtgactcgagctcaaaatcgtcgagcttcagaaccagagttgccccacggctcgagagagacctcgaatcgggttcgcccggaatggactcaataactagcttctgatgaaagttatcagcgcgactccacttcatttcgaattcattattcatcactccagactgcgccattacggaaccgaattttgatggaacattgcttcgatcccgttcttgttaccgaccctgttagaatgtagctcaaacgagaatcagaatttcatggaactttttcatccggagtacggatgctcgcagcacggctcgcatcgatccgaccgtggttgggtgaacgtgcagtccccccctcccccaaccttcgaacgagctcattggaggcttccagatgacagtgaggctcagccgtctcctgatccttaacttccgccctgcgattcgcggtttattcctgagttcctctcgcggactcagaaaatatgtagggatgggctggcgaatccttggcgtaagaatgactgaacacttcaacagttgctcagcgagcttcctccccgtagatataacactctcccacgaagaaaagcagccggcacagacacacggaacgcagagtcggaagctagtatgtgtcgtcctgaagccgcaaatgctaaagacgttgagtggaacgcaaatacctgcggttacttgtgttcacaaaacgaagtgctcgaaccgcaagaaccgcttttaatgcattcgttaccgcccgcccgcccgtccgtccgcaaggccgaccggctgtcggcgtcgtccctgacgaagcttgccgcggcttgcttggtgttcactctcggaggttcccgaacgcgagactaactcgagtatcataacatcccagaacgctcagctccatgctcgacatttgcgagcaacgccaagagagtgcaagccccccaaatagtcccgcggtctgtcgcacccgtcgtgacggaacgcacgttcccgcctctctaggtcatgaaaaaagtgtcctcctgaggagtcggtcgcataacatgaatcacggagtttccgtcacacatttcatcacagatgcgaaactttttctgcgactggagtcagccgcgtctcttccgtctttttccctcttcccagcaaagtttccccctcatgtttctgctgatatgagtgaggatctcggcttcactcgcgtgaccggcactgtcatccagaggaggaggaggaggacttggaagcggaccccgaaagaaaagcggaagcgcggcgggcacagtctcagagaagtcgttaggatgaccgctatttttcaaacaacagtccctatgcacgggttcgtgtccgtttcccctctggcacatgcctcgaccccccctaagtcacgacgcccgcatcgagggcaagctcgattcgaccggcgcagccattgaatcatttcccatcgccttcgctgaaacggtcaaaatatttcgtgctgagctcgaggtacggcaccgcattgctgcggcgcgatagttttcgggccggcaatcgcaggaacagtaatgttttttagaaaagcagcgaatggagggaagaggaaggagacgtgggaaatcctcggcccatttccgcgctgggaactcctgaatcgtttcgcgccaagccagcctcgagagcaaaaccgcgtaaacggtcgacgtggccatccaaagaaagccagcggggagtcacaaaggagctgaggaccggggcgcgtagagattcggatcttgacgcggatccgcacgatgttcggtgtttgcgagcctcgctgacggaacgacacctaacgcgacggcgaagcatcccgcgagccgaggtcctctggagcttttcccaccgagagcgagggctcagcaggaaaccgcatctggacttagaaaacagattgaggagcgtcaattcatcaacgagtcagtcatccattaacaacgtgttcactaatttacagaacacgcaggcggtccctttccgttcacttctggcttcgattcatcggagttccctctcatggcctgtcgttccgttctctttaccttcgttcgacgatgacggtgatggaagctttcgaagcgatgcgatccgaatcctgctcaaggacagcgaactacaaatatctgttccgcacgctacaattatcaacagcctcggggagtttactccgagaaagtcagcgacgcacaacagcgctcgagaaaaaagctccgagcgctcaaaacttttcactgtgtgccatcctgccagctcctgaaagccgagtgtgcctccgctggcagctaagcctggggagagacagcggaacttgtatcatctgaatgaatcgccatcaacgcctcaatttactgtggaaatcaatccgaccggaacgagaatcgcgatacgccgctgaccatccactccgaccgaagcctgagggatttgaatcccgcgattccgttatgtttaccgaagagccgtaatcaacatccgtgagcttcccaaatgaaatggcgccctgctctgagacaatcgacgagtccgcccgttatacgtccttcccgcgtggaattgatgcaaaaaaagtagtcggggcatccgaacggatccgctcatgcgaccatggcgatgagatggatgtttggaagctcccttggatgccatccgacggatgcatctcctagaggactgttgtctcacagatccgtgatcaggacttctgacgacacagcacaaagcgggcgcaaaacaaaggattccgctgaaagtgatgagacgctactctccggagctgcgcagccgggctaacgaccagaaactagagcttgaacaatctccggtattccaacagcgaatcagagaatcgagaatatccgccgaatcgcgctcgcggggccgcggagtgcggcgataaagtttcctgggtgacagctccgagaacaagtgaactgtgttccgtgttttcaacacgaaatgaagcaattaacgcaaaagtttcgcttgccaccgctcgatcctcccgtctactgaacgcacccgaactcggttggctgtattttttcgcaacataaaggactttcccgccgtctttttgcccccgccccttgttctcctcccgatcttccccctcttcatctcctacattatttcctccatccacgcgactcgagcggacgtgagccacgacactggggttggtttgaattaggggaaaaagagagaagtctggactccagctgagggagggatcctccgggagtagataacgaaatttaaatatctctcttcgtatcagtgctggctgccggcgcttttcctctttggtttcccaggggaggaggtcacaatgtataaaacaatatcttccagcctgcgtagactttttctcctcctcccactcggtctcctgctctgcttccaaccgtctcgttccctgcgtcttcctccgctatttacccccgcagctgccgctcggttgtcgtctccgttctctacggacgtcttttgatcttgtccgtaccgagaaagccaacacatactcgggaagatgaagttataccttgtctttcactcgcgtggtgccgatttcccgtcttcgtctgagcgcaccgtatctccctgaccttaatagttgagtttcggctgaagaagacgcaccgtagcggcgagcgacgcatagaactggggcaactgaggagctagtcaactcgtcacggaccgcgtgcctgcattcacagacttgccaaggggagagcggattggcgagcaccaaccctttcttccaataaatggatgcgtcctacctactcgcgggcgggaccgaggaacaaaatctcccatgtgaaaaggggaaaggatggaagttcctcatcgaagggacactgaggggctgccaacgacaggggacaacggcacatcttacagctcctacaatcctgttatgcaccaactcggtcggcgatgtcagtcatgccaagagagacaagttctgagcggaatccatttgctggctctcaggacgggaacctcatcggcagaagaagaaggaccagcatcgggacagatcataggccccaggccactgtcgtatgttgggatgctcatcttcatatgctgtgtctttgcctccctcaacctctctctctccatcgctcttcccaccccctctctcttctttctccctcgctgtcggccggatactcctcgcgtccgaagcctctgcgtttcttgggttcgttcggatcagggactccgagtgctagatccgccgcccctcgccccacaacgactgtctggttgactgacaggccttcctcctgcagcatcgatcttggccccagggagtgcgtcgtctattttcgtcgacctgtctcttagtcagactttctgccattagttacttgcgcattcgaccgcttgctcgccttcgagattgtttgtcgcgtgcaagttagacgcgagtcgatattccggtgggcctttggaaacgaagcgacacggggcggggcggaggaactgttcgtgatggaggacaaagacgagcggtggcacattctcgcttcggacggctgggggagtccgattccgagcgaaagagttgccgttgtagaggtgctggccgcaagctggctggtaatggcaacaacgaaggccaccggcttcgttggtcagcgagggctccgagttgtttctgtcagtttcggacggggcccgcacgttgaagagaggataatcactgcgagtccacccatgcccgcagccacagaacaacaagtacgtgacttctagcgaacagaggagagcgagcggaaggagctttggaggagaacgtagagcgccgccaggctaaggagggaacagtcaacgctgtgaacgaccgaccgaccgaccgcccctacggcctcgactcggtccatccgccgaaataggccgtgaacggccgaagaaaaatgacgcctttaattatcatcagagcgtagattaaagctatcagcctccttttcgtggtgcggcgctcgtccttttctccctttgcgcctcccgctctgagtcccttgcgagaccctggctcgaaccagtgaacagcgggaacagtgtctcgtcccggcggtcttccagagcacgcgacataatctcaggaagagtttcacctcaagcgagggcgtcgttgctctcgcctgcacaccaagctcctcgatcagctgctcgagctgtatttctgtttattgctgttgtttttcctgctccggctctgcgattcaattccaagtttcctctttcctctagatagtgaacccttgccgaattcccaggaactcgagtatgaggtgagttccaagttgaagaagggtacagctggatttgaacattgtcatttgggtaccgcctgaggatactccgagcgaactacgtgatcctcctcgacgaaaatcaaacgttgttcatggaggagaaccgcgacttcaccttcaaagagttatgtcgccgagtttcagggtcagagttagagtaaggtaggtcggtgcggatttccgcgtgagtccggcacaaatagagtgtatgtgtcgtccgtgatgttgcggcgctcggagccccgccgcgcttctttgaggattcctctcattaaccgagaacacggccggggcgatgaagacgctggggacttatgggtcagccgagtcgtgcgaccgaaatcgctgtccgtcctcttcaagttggtcgttgtttacgtctgcgtcaatttgtttcaagtcgttcgcgtcgttcccacttctcggtccatcttggtgaaagtctttgtccagttggcagtcccggggcggtccctagactcccgcgcaccaagccgtcggcgggcaagccctctggcaggcgagtttctcgtacaattctaccgccgcccggcctgtcggagtttccccctcgccgccccgggtcaggtgacaggcgagaatttcaccgggacgtgatacggcacaaacggtggtgttaatgctttataattaggtgcccgttccttggtaacactgcgttgtgtagtcagttgtctgccgggccgtcgaggcggcaacgattgggtcggcaacgccatcggcgctagcaggagcaacgaccgttgccgggcgaagtggaggaagatcccagctcagattaattatgagcttctgcagcaacctggtcactccctgtacgtgtcactcggtctgcgtctcttccgctgtcgcccctctcgccgatgcctccggatttcttcatacactctgtcagcactccgtgtgacgtcggggcagcagcccgccctccgttcctcctgtgacgactcatgatgatcatctcctccagttttcctcccgagcgaagtcggagccatgcagcctgggagcgtttatggatgatcacggcggtaaattgcttcgaaatcactttttctcgatcggaagctgagcggctctcgagcgagtgacatgtcggaacggtcaaaaccctcaaactccgacgggaggaggtcgaacgagggaaacgacgcagtgtggccgtcagtcactcatcttgctgggtcgactcgaagcagggccgagtcgagcatccaattaaagttggaagcaaacttcttgaaagactgacggcaacaacttcgccgcggttgacctcgagccgcaaaaacttccaccgcaagctcgcgaagctgggcggcgggaaggagaagaacggccaccggtcggctcctccgctcgtgccgcccgccggctgagcgtgcctgcgtgcacgcgcgcgcgagagtgggtggcctgtggctcttcaaatgacgtcgaacgggtgctgctgctgccgccgcttccccggccgggtgagcgagaaagaaccgaaaactaccacacctggagccgtcttgtgttcaaggcatatacataaatatgcatttatgcagattctttgctgcagcaacaccaaaggcgctgagttgagggcgttcccaagttttcgcgaccgtgagacgctccaaatgttcagctcgataagctccggagtattcaattcctgacgcgcggaaacaatggtactcccaggacacgcggcggacggtcgagccagatttcttcattccagatcggatcgctcaagttcggtgatgaagtgcttggtgcgcgaaaacaggaaaaaaccctacgtgacagttcgacgtggttttacgccgcgttcttgcttctctactacgcatgaaggcaggtgggatgagtttcgcagtacccaccgaagcatcattggagcctatcaagcgtttcacgagctcgcggctgtccattatgccctaagtcagactccctgttgttttgacacgtcagaacatgctctgaacaccgtctcgtatgcggagacgaagtatttctgtgtccatgtagagcacataactgggcgctacaccttctctgtcgagtcttccaatttctgacgtacccgaatcgttcggaatgattcggcttagtctatcttccgcagcgtaattcggttttcaagccaccgcccttcaactggattgtgcctcgagaatccctatttgtcaaaatgtctaccgagacatattagacagctagttccggttgagcctcaacggcttcctgtgctttgctcgccgccttctttagctccatcctcacccccccccccgctcgcccgggaagtcgactactcgtccgttgctcagacgactttctaaaccgttgctccgacaatatcactgactcggcccaccgaactcgggcaacttccgcgccgtggcgacggcctcatggggcgggaacagcggtgacttctttatctcaccgacttcctcgtcaagtcacaacgctgctctcgttcactatcatccaccatttgcatatttctctcagaaagttttcggatcnnnnnnnnnnnnnnnnnnnnnnnnnnnnnnnnnnnnnnnnnnnnnnnnnnnnnnnnnnnnnncatcaccgtcgcgtctactgatttcccgcaggcgtggccgtgctttgtgcttacattcgaggctgaaatggtccgtccttgaagaccgcctcaacagaaatctccgcaagggttggactcggaatcagcgactgagctcgagagttttcctcgcaacggttcgatcgcattcgatggttgcgtcctagtgtcgacgctgtccgcttgagctcgtgagccgagagaaatagtaatgccgggaatcctcggcgacgacgttgacggatcaccggatggacgagggcgccacgcgggcaagcaacactcgaccgttattttttttctgtgtgctatcaggtttctgcaaagcagcgattcgtctaagctatgcggatcatcttcggccgaaccacctctctttggctactcgctcgctggcttttccaccgcccgggagagcttgcttcgctcacaatagtcatattagtttttgcgctcggagccgatggatcggctcaatggacagagaggattggcctcggcgattcctattcgtcgtgtgaactgacgagccgacgagtctttctccccacgtgagcagccggcctgtcgctccgggccttactctccattttccctcccggtctccaggaaatgggttcattccccctccgacctcgctcgatattcgttccctccccccggtcggagatcggccaagagcagcgcccaaaacccggaaagtcaaggatcgagagggtttctgggaaataccgtcatccctgcatgaacctggagtaatcgctctgcgagatatacgatcgagagacggcgtttggtgagaactcgaccacatgcaacgcgggcctctcgcgcgttcaccgtcagccgaaccgaaaacagccacaggaacaacacgagaaaacgaggagggaaaattggaaattaagaaaaaactttgttcgcgtttcattccgtgcagctgttcctcctgacggtagcagagcggcagcgccggcgcgggatgataacttgcgaacatattacgaactccaaacacatgatggaaattagcgcgggaacattccgcagaagcaagcgacggtagggaagaccgaccgaacgatcgagcaatgagcgtccgtcgtgggaagaagtaacggccgtcgacgatctgcatcgaatatttcatcatgcgacgtttcctcgtggatccgagaagaaagcggaatgaacctccgaaagaagggaagatatcgaacgggatgagcgacgagctgactctcttcgaccgtccgagcgtcgctttcctcaattcggccctgccaggcagccccggatcggggcctgctcgccgccatcgcggcgcggcggtctgcctcgtttggcttcgcttgccaatccgttgtccgcccgctccgttccacctcactcgggccgccgagtggagggcccgcgcaaagacagatgaatctaaagattgcaccgtattgttacgacggagtttttacgggtgaaacagcattataaacgccggtacccatcgacttagacgacgttctcgtatcgctactttcggatgcgagctctcgcgcagtctccgctggatcgatccatcgtccttctcaatgtcttccgcaaggagtgatgaacgtcgtggcgccagagtaggagttcccgagcccggacgacttccaaccgataccggtgttgtttcttttgtcgcagcgagactgcatcgaaatcacccggatggaaattgcttgaccgaggaagcaggtgccgactaggattgagtctgacctccttgtcactccaattcactcaatcggaggacgcagaaaacttgccgacgaggaagggagtctaagaagacgttggtaagcaaactagtgagcaaggagcaaacggactaaccccacgcggactcggggcctcatgcgggcaatagtctgcagcagagaattgcatagtgagtagtatgtgtttattcctcttcggacaagtggctccgctaacatcatcgtcgtcgtcgttgttgttgctgctgctgtcggtggcgttgcagcgtctccatcggagaaagccaccgagggagcgacgcgctgagaggcaaacacggaacaatccggccgagcaagcgaccaactgccctggagcgagcattgaatgttgtcccagcagcagctcctccacaccgcaaaccaagctctgttccgcagttcctcagagaatcggaccgagtcacgattaggggtcggagaccggtccggcgtggcgctcgctttgctcacggcacagacggagatgagacgtgagttgtcggctcttcgtgttctcaaaatccttttccgggaagagcgtcgaggagggaatttttccttccgagatatcgccgtctggagtccgatggagatacccagcttcggatcccgtgtccgaacgctccgcagattaacaccgtcttatctgttgcctgaccttctcgaagctcgttcggtccgacgtcgaggaggagaccctcctccgattggactggcgctaatggaaagaaagtctcgtgccaataagctctcttcggaatctcagcgtggagctaatattagtttcgaactgacttagatctagataagcagccgcggtggcggcggcgggctgggcgcaagagggagcggcggcgacgactctcgcaatggaaatagaagcacaaatgagctgcacgaacgggcaacacggtctgaatccgagttgggcgaacggaaagttcgctgctggaatactctgtggattcctcccggattccgcgtcgacgtcggttgccgcatccatctctcgttgcgcacgtcacgcgggaaacgaaagttgctattaacataagcggcattgtcacgtctgcgcttgcgttctccgttcataagagttccgagaacacgcgatctagatctacagatgacggcggcggcgacgaaggtctagatgacgatgaagatggcggctaccgacaactgccaagagccgtctgggcgacacggagctcggcatcttgctcggaagaataggagcacaggtaggggtgaactcacgcgggaccgcacggtgggtggaagaatctcgaaaagtaagtcactcctgccgttgttgcggtttggagtctcgtttcgggcgatcgccgctgcgttggcgtgacagctcgctcattcgggatgaacctcgttgcgtcagacgtgaaatctgaagctccttccgggaagcacttcgtgtgtcctctatcgaacgcaagttcattcgttcgctcgcttcgtctgttctacatgacgtcgtctgtccataacgacggtgacggtggcggggggtagcggtggcgacgacgtcgacgttctcggtaggcctggcacatcgagcaactttgtgaggcatagtcgaatttttttttattacgcgcgcggaaggggaagaccatagagtacagcgcacttacgcacacttacacgcaaccagagcacatactcgcgcacagcacgagatcggagaaggaggggagcgtcgggagaataagtggaaaaaataccaccgctgctaccgttaccaccaaagctccaagagtagcagcgagcacagatgggaaaaagatagaggagccactttatgaagaagggctctgcggttgacgacattgagagaaaaacgggctactctgtccctctcacggtggcacacgcgcgtcttcgctggcggccgtcaatctgccagccgtcgtctcataatgcacggtgagaaaagctgaaaaacgacccttaaccaaagcaagtcgcgcttcgcgtcatacagacttttgttccgcgctatttcacgacgggagattgttccgattcccttctcgagtcgaggacgccgaaataaatgagcggagggagcgatgctggatgccccggcgatcccaagtcgtacgcatccggatgactttccttctcgaagtttgccttttccctccttttccggaagcgatcttgcgattccgaacaagtctagcacagattcgtcaccgaagaatcgggcgtagtctgatcagaggccatttttcacgcaatcatgggaacaggcaggacaaggaataaagacgcgacgggatgagaggatcggaaaatatcctcgagtttcaactgcgaacagagcatcgccgagaaccgcggaatatgatcaaactaattgatccgtccaagctggaaggaattcgatcggcagccgggcgggaatggcgacgaccgtcgcagccggcaccgaaccaaaaacggcttcaaagcggaatccgtcccgacgggagcgccatcgtctcagctcccgattgtgtggccagcccccaatttccaggggagtcttcctgtccctcggcttccgacctcaatctgggcatggattcgggcttggaatcgtttgaggcaagcaaggaatatggatctacgatggcgacgacttaactctcaaaggcttctttgatccaataactccgtattcagcgtacctcttaggctgaataattagacagtcgctgcgtcccgtgaccaggttccaccatcagctccccccttccgagccccgtatcccttatacccttgcataacatagggagctcattcccgcggcgctgtcagccaccggggtggagaggggtcgcctccagcagtcgggtgcgtgtgtgttgaccgtcacgcagaaactatcctcgtattatagttgcgagaatattccaaccatacacggagaacagagcgtttattaagttttacatcttgttcagtatctccacttgctcaaactttccgcggagccggcaaggaattagtttgacggcctttggtatcgaggtccactacctcgtcagcccggagaaccgaggcgaccctgtctctgatttatggctggcttccggtatcgaacctaccttccacgccctcacctggctggacaacgcgtcaccaacgcagaatcgccgacatgtcgcataccgcgcttaccactcggctcgcttcctcgggtgagacctccagaccactgatctcgtttgttgggaagaagcgatcttgtacgccattcagatgttgaactatacacggggaagtcgatgattgggacacgtttgtggcatatagttgattgttttactgccgatcgcgccgattggaactattcgctagttcttgtgtttgtcgactgggtttgaatgtaagatgtatgtgtaagatcccttgtccacgtgctcgattcatactttgtacgggaggcacccaagaggcgaacgtcgattcggtggagaaattctgaccgcgttcccaggcagtctgtccggatcgggaactcgctggagccgccgccagttctagtcgcatatccatcctcttcaaaagagacctcaaccagaggacctcaactgatcaccctcgagacaaaagaaagcagttgcaagtcaaaatgagtttcagcagttcctagccccgtgttacgttgaggtcgctctgcgggacgcccgtcgtcgcattccaggtcgcgacagggaaaatctcggtcggagcccgaatccgagtttttctgattcgagagcgggcgatgactttcagagttaccactgcacaggacagcatgacaggatcctgtgtacggccggctcgctccgtgagcttttttgcttgctgacagtggtcccgtcgaattaatgaccggctgccaagctaccattgtcttcggtgtgaacgcccaccgccagggaacaacggagaggcaaatgtcgaaccggttagagcgagggacgcgcgacacacgacgtgtgcttcaagtgcagcgatttcgaagaacgcggcctgtcgtagggaagacagtgcgctgctctgtggtcgctttgtcccacaaagggagacccgcgttcagccaccgacgccgccggcggctgcttttctgaccagctgactggcgagctggcaggcctgtcgtgccgtccgaggtttcggttccatttcgatgcaaatgccgcccataatgactcgtaatgtttcgtcgtcgttgtcgtggtcgccgttctttttcacatggtgtggaggacaaagccgaagaatcgccttttagagcttttcggggtcacaacgcctctgaccgcaaacccggaaccctctttagccggccccagggccctggcaatctcgaagatattcgaagcgatgcccgtctctcctctatcgctgcctcgatgtttttcacaagcccagagcactccgctgagctcgtcgtccccgttgcgcagcttttgacgaaacaatcctcgacgactcagattctccgttccgtgtcgagagattcgaaaggcttctgaatgaccgagattgagtaattgttcctcgctccctcttggaggtcgcttctcccaagaatctttacaagtagagctcgtttctatggagatcaatctaagcccgtcaatgatgtggtcgtcacaatagccgtcgcgatccccgagaacggctccgaccgtagtcgcgtgtacacgatccgtacgccgctgcgacctgaactgtgcagagctctgaacttctccatcagctccggtttcgtgttcccgcgcactctctgcatcaaccagctcgaggctggctccacatgcacatcatcatgagcctctttcgaaagttcccgccgaaagggggagattaatcggcgatttccgtgcagcgttcgggcccaggcgatattcggccgattcgatcgccttgtccgccgttggtcggtcagttgcttacttacttagtcgatcttgttgcgtttggggcgtcagagagagggatctagccggggctgcacgcctgcctgccctccatctgactgggaatagccatgtatattaatggatcacatatatctcctcggattccccacgcccttctcctaataatcggctgatttctccaagggccgattgtgtgacgcatatatcaaacgacaacgattattgcgtttctcaaagcggtactcacataccccttccgaaagggcgccgtcgttcattactctcactagtctaccacggcttgccgctgaaatgcctgcccgagcggacgcccgtctgcatgatcggtcgagtgccactcaaatcatagcctcctcgcccacgctatttgccgttcactcgagtgtctctacgtattcttccatcgagttatttccatatcggggctcagaaggcccctgtctcccgtgaggactctgcgaaccgagcagctgttctgatggttgaccaagatgacggcttcagaagaagtcagatctcagatttcttcattatcaaataagagtcgatcttgatcctccttctctgccatccgatccgagcagcgggacgacggcctccactccatctttctcatgtaaatgctgagaaagctgaaagcactatgcagaacaggacggccgacttccgagccaccgccgaacgaagagggattcagcggaagcaacgacgggaacgtcgaaggacgccgtcgacgacaacagcaccgctccgagggcggagagaacgtaaggctagacgggcgttgtgcgcgggctcgcaatatcgtgtacggacttcttcctatcctgattctgctctttcaccgccggcagaagcgagctgcgcgggctcagtcagatcggctgtgcgcttgaaagagcttgtggtgaatgtcgctaacggctcacaggattacagtcatcatcgttgttgttctctatcgatcggttagttccttgttcgtatgtgtgtgtttgtttgttcgttcgttcgttcgagtctttgcttgttttctctctcgattgttcccacgcgcccgcgcgaggagccccccgttcaggctgagcattgaagcagcgatcttgacgacgggcgcgagaaaggttcggcgtccatccgccgatccatccgagcgaggaggattgataaaaactccgaaattaaccatttttgttttgcaacggcaatacagggcggcagcagcaacggcgtcagcatcgcagacatcacacggcagcaatgcggcacagctgcacgggcccaagcaccataaagatttcgacggctgaagaatcgccatcaaacttcgtcatcacgccgctctgcgtcggaaggggaactctccaacatctgttgtgaacttcgaattttatttcgcttcgcctcaactcgacgcccgtgagcaactcgaatcagctcgtgaaacaggaatatttcgcttggaccccttataacggcttcgtcgagttcaggcctttatgtgttcgcagacgctctcagggctccgccggcgccgagtttctgccttccctcgtgcgactcttattgccgaatattctcagggacgacttcgaaataccttgaagcccttctgcggtttcgactcgtcgggccctatcgcttcgcctcctctcctcagatttgtctgattcagttcctccgacgcgttcgagatatgtcactggaatagagtcctctgatgtgtttccggattcattcgactgtgtttcctcgaagatcccgagcctttcagtactagctgaaatacatagccgttgacgtctttcggtggaatcggcgccgtatgcagaggatgagagccctgcttccgaaatatggagcccgcgaagattggaatccaacccgcggtctccgcatcgaacactggttcgagtgaacgaaggccggccgacagccgtacagaccgttccttctcccagggaggatgtttcgcggaatggaacatattgtgaattggacgcgtcagctcacgccgtcgcggaagtgtcggtctccgttgtcgattcagctccgaaaattctggcgccagctcctctgaagcggccattcccaacaaaatatcgtcgttccccttgaagcgaacagaaaaggcgtgcgaagtacttcccgctgaatcgtcgttattaaaaaattcttccacggcggaagccttgttcggcacctccatggtgatagccgagaatggcatttatgtcgcttcctaacgagctccctcccctcccgctacggtccctccaactcgagctatggccctccaggatccgaacgctccccatacgacatccctcctcgacgactacctcgactctgtcactggaacactgcttctcgctgtcgcgatgaatctgataactttcacaactcgattcgacggcttcacagctgagatttattggaggttcagtcttgaaattattcagtagtggctcacacttgtataatcgattcggaaacgtcctcgacggtgggggcatcctttcagtgaacagttgttgactccagtaggaacaactctcctcgatgttgatgaaatattcatcaggattgagtcaacatgatctgggagggtgaaattattcacagagtgtttatgggcgaagcaatggtttgactgtcactctaatttcagcggagacgcgctgtaaactgcaactagtagcgccacctggtgagggaataagcacctccgtttggggggttcgaccttttcggcactcgtacccttttcactctctcgctatcgccggcaatccccgattctccctcgatttctcttttccgagcgcttctcactcgggctgggacacactatcgattgtccctccgggcagccgtcgctgctgcggctgttattcttgcctcggaccagtttacactgaaccgtgcatttggaccttcttgaggccgaatttcgactctgtcctggctgtcgattcccctgctccattctctcctccggtcctcgccaactcgggccgatggaatggaaaatttttgacttccttcaactgggaattggatctgtgcagtttcagaactgaatccttcgaaaacgcggatttcagcctctgctcgcaactcccgagggccttgggaattattcgatgtcggaagccgacggagatatttagcaccggttgatcaatagcgcagggttgggactctcgtctcattcgtctccagcaacgagccagaccgttgtcagaggcctaagggaacgcagtcgtcaaacgaaaagcacgaaagacggagggaaaggaataataatcgcgttacggccctgtacattaatgggatccgatttgttggagtcccgtcgcagagttcctatgacctctgtatcccgtgctcgtcgattccaaccggattacaccgcagtcgacgacggcaccgaagtattcaggagacagccgagctgcgaccgtggcgttcctgagtttccagaaagcctctgttgattcctccgaggatgttccgcctcagcatagatctcctcccgaacttgaccgccggcgtgtggtttaccctcgtgacggaggtcctccgttaactgtgtcagattgtcagagttctaaccctgtcccgtcacgagttgcgcgatcaaatttcggagcaagtgttagaatgtgcgctaattgtcgccgcgcacgctctctgccgcggagtccgtcgctgtcaatcatcctccatccgtgtatgctcaggttgactcgcgggtgagctccagggcgaacatccggtagcggatgacacgccggaaattgagctagttcatcaccaggacgccgccaagtgagaacggactcctgcgtggccattggggcgccagcctggtcatcatcggccacatttgtttccccggaaaactccgaccggaccagcacgctccgtcgtagattcacgggtcgcgtgactcagaccggggctcaattgactccccatgagcgagagccggaaccgtcctggaccgactcatcgtgaaacagagttatctgctgtaggcactcggtactgatccagctcctgtctgtgggaagtctagctcaactcgctatgctgagccggttcattagtattcgaacgatttgaataatatcgcacacgagtaataacagcggccatccgattgcgctatcgatcagaataccggggattgagagttgttccatcaacgattgcggaaaacaactcgctgataaacaaagaacacggtagcgagcaaccaaatcccgctaatggattcgtcgggtgaccgagcgaccttctcggggaatcgcatcacattgcatcgtccgataaaaagctttgttctcctttcccgcactcgttcagcttcctgtttcgtcctttgtgttcgcaaacacagacggtgggagccggactcagcgaccaagtctttcactctttcgaaacagcgcggtgtcgagcgtctctgatttcacgagaacttattgcggttaatcagtcgccaactctccggtgctcctgagccctcggtcgagaggacgctcgcgttcggggtcctccgagctacggtcgcgtcgggctccgatttcagtcctccaggtttcgcttcctattctccgaccgccgttctcggccgctgtcgtctctgcctttatgtattcgacgtgcgttgttgtgatccaacaacgagagaaatcaacctgggtccgaggaggttttgacaattccatgagcgcgccgagcattgttgaaggcttcgttgagcacgcgatcccgaatcattgattttcgggtcacgccttctcggtgctctctttcctctcgtgcccaacaacgacggacgaagtaagggcaacggtggcgcgaccctccatcgtttccttccttccgtcacatcggaccattgagactccaacttgccggaatgctcccgatgacggcctttccgcagctttggactgcggatgtgacgtagagcgatatctttctcacaaataaggagcggccggaagatgttcgcgatgccgcattttctgtcgggcaaagctggaatatcggccgactaccggaccgaagaaacgattttcgcattcaatgaccctggcagcggcttggccgaatcgactaattcctcagatatcaactcctcgtccccgaggaacagggatgagcttgtcggttgccattgtgctcggaccattgtgcagtctgcggaatattgcggcggcccagccgttgaacgaacatgcttggcgtgtccgagcggcctacctatcagagcgcttgttggcgcggatgtatcgaaaagtcttccctgccgtcgtttcccggacggctaggaagaccgccagaaaaatcgtgagacacgaattctcttggcagggcgtgggcccgaggtcgaaattgccgttgtttctatggacaatttgaccccactgatatttctgccgaggagcgggactccgggtcggaacgtacccgagagcgaaaaacgcgagttgtcggcctcgtcgggcgaagctcgagcaacgtcgccgaagctattttcaagccccgacatcgagagctttccgctcttccagctctgaatgtataaagcttgtcgaaaaggagaagcgagatttaagccgacaagcgtagcgaaacgagtttcgaaattctgcgcaaaatttcaaaccgagttcgagctcgacaaagtgccgtctgaccggctataaagcagctctcggctgagaggtaaatcctcttcgcgctcgttcgatgactttttcgcgttcgctctccgtgtccttcccggatgtattatttatacgcaaatctgtgccgtcaaatgttctcctggggaaggagaaacccggaggacgtaccaggcggagaaggcttaggcagccagtctcatgagatggaataaatccgagggaaacgcttttcctctctatagcgcaatcgaaaacgatcgtcgacgatgatttccaaactttcggaagccactcgttcgaatcgttgccagagatgcctcacgagcagcgcgaaatatcttgacgatctcctcgcgaaggggagagtcgtaaacaatggagtggggagggggcgcgtggagcagaacaatccaatattaaagtggtggacccggctctcgcagctactcgaatttctgcgctttccgttcttagattgaacaaattcatctcaaaccgtcggaatcaagactgcgttccgcggagtcagcgcaatagaatttccggtgtcgcgtttctctttcgagttccctccccctccgagtggaatccaatcccgcgttggttattgaccgaagcctcatttcctgtggttttgcccgagcgacaatccatttccacggagtctcccgagccgagttcccgccaggagatccgaagccgagcaatcgatcgcggggttagggacgagtaaagtttcccgatgagtgttgcaaacgattctggagaaaacggttcgtggaatgccctccgacgtcgaatcgttgcacgcgagctcggaattccgactaaaacctcgacttttgtgagaaaatcgtcatctcgtccttgacagcgtctcccagcacatcgagcagcgtagaggaattcgcaatatcagatcctctcctcgcaagcattccaccccgatgctccgaaaagggggagcggtatctctgagagttaatggagaggcgcgatagtcggtataaccaaaatcaaaatgatacgattcagaataaggatgatgacgagtcgtttatcaaggtatagatttcgggtttcgaagcagaactgggctcaaaggctcgaaagttccggacgtcgaggatcagctcaaaggaatcgaagcaacggaaggaaggaattgtgaagagtgaaataaacctccgttttggggagattacgctttcgctcggaacgatccgcaagctaggtgcaccgcgcttcaaaacctccgctaagggtcccttgccacggacagcgaaattgattcctcgattgtccaagttggaacacagaagaagttcctccgacggcgccgaatgggctcctaactcttttttccgtctcaaaagtcacgatttcagtccgacctccgacgtccagtaatttctttccgttccggaaatttgtgcttcccgagtaggaagcagagtaactgcccgctccgagacagcgaatcatcaccagagaactccagcggctaaccgaagccgattagtctaatttcgttgtgccttgaggagtgcacagttgggtacgcgaatcgactccccgtaagccgagcggtgacgactgcgtcttcagaatcgctccgtgaccgatagaggccggaaagggcgaggtccgcgttgtcttggtcgttggcgacgctgtgtcccccttattgctcgctcgaggaaccgacgctcggagtcatgaggaataacacccggaaaccgcatctgacaccggagagtaaagagaggcctcagcagaggcgcccacaatctggtgtgcgatgcgcggaacaggattatccaagtcccgaagaatctattcgcggtcatctaggagaggcccatttacgagggtcggcggtagtcacccatttcgtctggttgcccagaacttattccaaaaaatatgaattcccgtcgtccacccgaagatcccttcctgttccattatctcgaaatctatgtgtcgttgttgctggcgtaatgcacatccgaccgtccaagaacgatgcagcctcctagcttctgaggcgtgatcggtcaatatttcgatattcaatatataccgcgtcaactcccatgttcggatccaaggagcattccaccgaacacggcgaataaccagggagaaatatgggattctggttgattacgcgagagatgacgatgatcccttcgagaggctcgcgcgaactccctcggaaacctcatcaggtacaatcacaaatgaaggcatggccaagtaagtgccggaatctttcgctctgaaatcttgtttcggcgctgcacggcttacgatcggagggtcgatgagtacgagatggaatctttccaccaagtacgttgggaaagctttccggcagctccatgtgcagaaatttcctctagctagccctagctgcgaccgcctctccctcgtatcggaacggcgaggaccaatagtaggacgagtcttgctgtcgttctcgacaaaggatttaatccgcccccaatcggcttatttcggagacttccgaccaagcaaccaactaaggaatcaaccagacgccggctcacggcactcatcgaaaaacgtgagatttggtcgactcgggaaaatacttttgtataaggcctcaagcttagcaacactccccactaatccctcagcagaggaatgactcggattcccggcgattcgttcctgagcacttccccggttccattcgtatcaggtttcggactgcgtcgcactgagctccctcaggttccccgctctctgtgagaacgcgctcctctggagattcatgaatcgctaagccaataccgtgtccgaacgggaggggaataacgctgaccagagatcctctagaggggctctgagcagccgaagaattgatttattggaacttgaagctgcgatcatgtgcggtcgctgtcgggcttgccccgagcgccagttgttccttcttcggcggggcacgtcattcccatcacagtcgagctcagaaagtggcaacgatgctcgagggactgcgagcccgctggagggaaccattgtcacgcgtgagctttgcgacagagaatggaacactgacgcaaaccccgaacctgagggtcggtcgggaggcggtcaagcgcacgttgttggatgcagcttgccgacttgcgacgctctgtcggaatccaggtgcgctcgagtcgggctattcgtagcccagagaggtacgggctacgaatagcccgatccgagtgctgggtcgctttgtcgcagttcaccggcgccgattccttctccgagcgttgcgtctcagtgttgactcgggatctcattagcgtagagtggattgtttgagcgatcgtaagagacaacgaaacctccaagggaggcgccttcgacaattcaagcggaccgacacgcaagcggacaagtctgcggagggatgaaggcacactctgaacgtacacaaagccaatgaatgcaattagccgatcgcgtcgccgcagccgggcaattaacagcggtgcggataactgacgcgcaaacagcatgaatgacgagaatctacgccggctccgagcgtccccctcccagttagcgcactcgtgccgattcactcggatcctccacctcctcctcatcaacccatccgcacactgcagcagtgaattattcatgatgccttttataccaccacctcggacgaccaacagtcacctaccgagatctagtaacacgttctgacgtgacgtgaactgtcacggctcgaataactcctccgctccgagtccgtcgggcttctccagacatcggttccgaggttgtcgtcgtagtgtcgcctaaaaccagacttcgatctccgataacatttttatccagagtctctgttcttccctccccgttcgacggtctctcgaccactttgtatgaatcttccggtcgctcggaaattacctgcctgccgataatcattagagccagctccaagacaagagctcgtccttactgctcatgtcgaggctctctcgtttatgggcggcgacaaaggacattcaggagctcccctcaggcgttcttttgacgcaggacattcttatcctctctcgacgcaggccggattttctcggaaacgaaacgcactgagctcacggaacagctgtcctcatgagagcttttccgagaaaggaatcccagatgtgagttcggggtgtcggtagctcaacttctaaaggtcgaggcagacgcgccgaacgaggaaacagccgaacggtgtcaccccttgagtctccgaggttttcctcgacaaacgagtagaacggaggattgtttggaccctgctgtcgaactgttcgaaccgagaagcctcttggggttgtcacgagagctcgaactcgttagcgaggagagcgggcgtcgtagaaaacagcatcggatgttccgaaacttgacgaaatactgcgcgtccagacaaagtcagtgtacgtggcgcgtgcttcccgaccatgcacgtgattccgcccacacgagctcgttcacttaccttggacgttcggacaacagggctgcctccgatgaccgctcgggtcagcgctccgttccgatgccgcgaacgattctcacagcgagccaatcttcagcacaccacaacaacagagagcgttcaccacacgttggttgggaacaaacgttttcctccagtgttattgtagttttgcagggtaggggcacgttggagtctaccggaccgcagctccctcactcgccccccggaacctaagccctctccacttgctgtggaccctcgaaccacgacacggcggagagatccccgcaaacaccgaatgacgcaacgactcgggtatatccttgacgaaggtcggagcgggcgcactattagtcattgagcggcgcctttcgacggaacgaatcgctggggggatgagcggagtgaatccccccagcggcgaagggctgcgtcgagagctagaagcagccagtccttcagaatcggacttttcgaaactcaatttgaatttctgcgccctttcattgcagcaaagtcgtgttcacacggctcctggagcatcggcgatccaggagagctcttgagcgcggtatttcgacgtgacatccctcgacgagtgcctcctctctccgaccgcgtgttggtatagacaggcggcactttttggaaattcgttccatccttggacctgccagaggagctaggggagttccggccccctccctcgctaaatgagcttgtgagctctgccagaacctgatcacccggacgggatcaccgagcccttcattggctccgtgtttgacacgtttcgctgaggctttttacggtcaatcagagaatccctgcctcgaggcgaaagctacagcagaaacaccagccatgtgaagtagagtgtttcccaagctggacattcgcccagaggcttatgagcaaggaaaacatcggcgctctatgacttcttttgccgtcgaacctactttgacggtagttctccagctgatatggttcgatttggacaccttcattgtgacaactgctgatcttgagcccagcaacagcgtgccctgcaagcggattacgtcttgccgcttgaagctccgttgccgaggaacctcagctgaggtcatgatccgcgctaatctttttggttcccgattgtggtcactgactccgggaactgcttggagagcatgctcaacacactcacctgtatgaccacattttgtcgtaccggcatgcgacacgcaatgacgctcttaccgattagagatgctgaaagatcggtcgagcgattttggtcgagtgaacagagccgagcgatacacgagcaattttaccctttattggaggactttcctctcaacttgcgagcagtgactttgtttcactcaaaagtctcccgaactccgaaccctatctcaaaaaatacagagtttctcctaggaatttccagtggaactgctccgaattcgaattctccttcccttgcaaagtggcaagccaccctctcctatctgaaaggtgcctcgaatacggaaagagagctctctcactcgcgtgaaatcgttgccaagagctcgatgtgaaacatcacaaaatagaggcaaactcgatgcggcaatcaacatacgaactaaagtctcacatgagctggaaacataaactatctgagtcgagtatttgtccgttaatcgcacgctcactggaatttcccctaagtcaacgtagaaattcctctcgcgaagacgaaaggatatctcatcgctgagaggccgcaggatctctggtgcgcccgcttccttttgagattgatcacagaaactttccaacaagggatcagatctgaaaatcctgaacgaaatgggcgaagatggcgattcgccacttctgttccacaccattgatatgataaacttaactattccgtgatatgtgaacgaataaaacacaaacgaaaagttgaaaacgagtcaataaactgtcgttgatgccttgcgattcctcagagatcttcatgtcttccctgccctcgcagccttttttcctccacaatccgcgggtccgatcattccgagccggcgacaatcgacagagcttttatggcgttgagtttgtcgcgatggtacaatgaaatttcagcatcggttcggcaattctcgttgagagaggggaagcatttctgtagacgggatgtggcctcgccccaatgcttcgtctgaaacggattcattcgcgaaatcattcattgctatcatcatcaatcatcaagaacaatatttgctatcgtcatggtcgcagcgtcggactagggtggtttctcatcattctctccagcggatagttatcatgagggactcgatagacggcgtcttctccactcagctcagacgaaattcaccgagggagcattgagcgacgatcgataatccgatattcactccatcagacaagcttttaccgcgaagctgatccgagagcgaggtcagcagtcgaacagcacagacggtcctgattatagacaacctccagaacccccggaaggctaactccgcttgtagaatcgagaagacgcgtttccatgagattcgaaatttcggtgcttataatctacgcgacatcagcgaatatggacagcggcagcgggttcatgcacgagcaagagtttggtctaatggaggacttccgcgttttgttgcgaagttgggagcagcttggcaggtggtcgattggatgtagaagactcgtttagacgaaatgctccgtcccttcccggactctgagcatgacatcgaagaagatggagcaccgtagcagaggacccaactcgccagcctgaattacccctgagtctctagtcagccacaaagtgaatttccgcttctcgagaagtcacctctccgaccccggtcggtaatgctcggcccgctcgcgctcaatgaccgatgagaatctaatcaaaagtcccgaggaatcatcctcggaacacacgtgtggttgtcacaggggatacttcggttcatacgacgccgcattcatgtttccacagataaaactcgatattggacgcaatccataatttgtgtgaagatctcggtcacagcacacaccgattctgcagtgcaggcgaacctggggtcgaacgcgaacggtgcttttcccaccagctggtactggtttgaccagcgtctgctcggagactaaatgaatattacacgagagggaagatgctacctgcttcgagagtggactgtcgtcacttatgagtctcatgccgattcataacaaactatgatggaacaatagtgtctacacttcttgagttgatcaccaacaaaacagaaaaaaaaaacaaaagcattgttacgatgaaaatacggggtgaatcttccgccccgttctgaagcagatttgattcgcggcggattgattattcgctcaaaccatcgctagatcctctactgccccgtaattgtcacccgcaaaagaggactgaacccgaagctcgtgatttgcttcatcgaaattaaaatttgacagtcacctgagagatgatgagcgcatgcaggcaaggctccatgtactccaccctgtgttcgtagatggctggtagttcggaacgcagcagagcgttctgagtctccagatcctgattggaggtttcgacctgtcggcggcactcagcaagcttggctatgttgtttccttcggatgaaaaacccaagttggaactccgcaggttcggctctgagtccgatctctcggttacggcgctacggattcaggcttccgaagagaacggcgcccagaacgtctcaatgaaatgttctcatagagtcatctcaactcaccagtggcttctttggtttcgagctttgcaactttttgcgcaagtcgttgatgttcctggacgagatgatcccgttttttcagagcgacttgcacgtccgggaaagtggcttgataacgtttcagaggatcaaccagacagcgtctcaaagcaatgacgtgatcttctacggcctgatccatctcggaagcatagcataaccattcttctatagttctccgaaggtcgtcatgttctttgcagaagtcatcgttcaccaaatcggaacacaactttttctctgactggtaaagcgctgttggggcgagggaagagaactcacttagaatagagtcttccggccgtcaggcgaattggcagaacccaaggctggtcactgcactccacattgagccttgatccgaggcccgattcctaccactggatcccgactcggaatcattgctgtcgcggaaactatcggagggaatcaagtcgagtcgagaatgtggttggaaacaccaaccttaaaggaacacttccgactcatgtgaaacgtccatgaatcccaaatcgtcgcttcctcactgagcaacacacgcaaccaacccgggacgccatcgactcacctagcatgatatcctcatattttttggcacttttgtgtagcttcttagaatttatttccaaccgatggtatctagaaacgatctcgtcgatcgagtcacttccttctccatctggactcgtcggagtatctttccccggacggctcgagagccgtttgagcgggttcctggaaatgagcttgagtcctgatctcggataagtcatgcaagaacgagaagtcgttcgcgagccgttcgacagcctcgcgtactagagttccatccaccagatactaagcaaagctcgtcgtttgatcgaacatgtataatacgcagccatcaagcctgatatccttgaaacaccaacgttcctcaccagctcatttataatccataggcccgcgttgaatgatgattcaagatgaagaaatgtttcacttccacccagagagagtcctgagagttctctaatgacagctcgctcgatggtagtctgctctgtatacaaacacagtgaggtaccctgcgagtgaagatggagaggagcctccaacgactttgcacccggaaactgggacgagcattagcttgattagagtcgctccatcctgggttcctacatttggatcggaggcaccttgccaaatggagaccgaggagtgccggaaccaatgtgcccggcctcagcactcgggtaccaccggaacgagcccgccaaccgggtgcagcttggacgatagctgacggtgtgaacttggttcaagcatcaggctgctaagaggtctgtttttgccgcccggaatcttccgaatagtacgagtgggagcccgcgtcagctagttcctcagaaggtttaactcgccagtatctcatcacagcaaagccagaaagaagaggttcgtgtctgtatgctccgggcgaatgtttccaagcgttccccaagtgatcaaccagtctggctcccaggattcgatgaatgacgatgctgcctcctgtattgcagatggcggagagacccgaggatttcaatttgcctgtgtccgtcgttgctcgactcctgaaagaatcgctacctgaaggagtcgctgtgtccaaggaagctcgagctgcgttagcgaaagctgctgcgatattcgttctgtacaccacatctctttcaaacaacttcgcaaccaaaggtttctggaaattgcgaggtttttgatgaccgtgggaatgacactctacaactaattatcgaccgcccacggttgatccaacgccgacgagagaacaatctggatcgtttttctaaagtctcgccctttttttctgcctccacaggcaagcggaagactgtcacgggtcaggacgtcatggccgcaatggaggacatggagctgtcggagttccttccccaacttcaggaagctctcgaggcattccggaaagagaagtccgcgaagaaagataaaaaaaaagtcaaagaaacacctgagaacgctgaaaaagaagccgacggtaattaatttattggggattacaacgaaaccgttgtagatattcctgggaaaaaaacgtgacttgtacacttgtagcacaacacccaaaaactatcgttttttctgcgcgttcctccgcccttcccattgtgttcggcgttagtttctcaatcaagattctattccgccatgttgccaacagcgggcatgggacatggccgcgatacggtgaacggaactttcgcgagcctgataaagttattcttgtacgtgaataaaatcatcttgttctgcagcgatacatacttcttgatcgcgtaagctaaactggcgtcatcgacgtcctgcttgggtgatggtatcttgaccacctattcctggattggcctaagattttacatcagatgctgctgttcttcctccgtcaatccacctgtctgatgtgctttgttctgccccgatggatggtgatcagcgggttcgatgaaagaacatgcccttgagcagtgctccgttctttgcgcgaacatccatcaagaatgcttgagaatagttaaccccactaatcgattcgcaacagattcaagttgaagaagtactaacaggaagataacccgattgattcacagacgacggcaaagacggcatcgaaatgatcgaggaacctgtgagcgatactgacgttgcacccgaagatcgtcgcgaagccgcctgaagaagccgtgaggtacttctggttgtgagccattgatatttgggcactcgttgctatatatagggagtattttgtacattgttcggataagcattacaacgtgagcgacctgccgcccaaccgagctatcagcatcggaatcgcgctgaacccactgccttttgtaaacagtcacccttctcagttgaataaagttgaaacgagataatttcgaagcgacctcttctcattgatcgagaattgactcacgagtcatgactatgcccgactttaggtgctctcttcgacgtttgcctcaagcagactaaggaggtcatgtctgagggtcacttttctgaccaccgcgtgttcttcgaccggtcgggcgatacagacaacgctctggagcctttgggaaagtagacgttgctgagcccactgcgtttcacatccacgcgattcagtctacgtctgcatgttgtagcagtcctgggttgacacactgctcgtccgcatctctttcgggaaatttcgcccagccaagtttttctgatgcgtgtgtcgcatgcagggtgttggcttggccacgaccagttaaccgactagagtctcggaatctgttcgaggaactgaggttgagagtgacttatcgaatcggatggaaggagattattctccttccgttcgcgtaagttgaggtgctcgagaccactggcaccggtgccatctactccgaggagggcgaacgttgctgtactcagaattcctaggatctattggtcttatacttcggaataacgcagaaccttccgacttgtgagaagtgaccaacttctcggtaacgtttcggtccctctgaagtactcacaacctcgtctccgatccccgttcgtctccagctcgcgtattcatggaatttccgatggagggagaggaacagatcattttggcttgcaagatgagttatgggatttcttcaatatctcacgaacttgccaagcgtcagtgggctgatccgaactgtcgcacacgaggagatatacacgagctgcttcgtttcgatagcgaatttttcgaatctcgcggtatcgatactgaaagtcgacgaattagctcttagcatgacccgggatctcacaatgagctgctcgccaatcccgccaatcgatgagatcgcagatgaatcgttgacagatgttctggtttgagtgctgtcagcgctgctgcctaaagcgggtctcagttggtttgatatgagtttgtcgttgaatattttctcctttcgctctcctcgatatcttcatgtctttgacctggttcggaccgcggcatggtctccctttccaatttcccccacacataaggtgcgagatgttttgcaggagctcaagtacccgaaaccagatgtgcagcgttgggaaggccgaattccccgacagcatcggagggaagctcttcgttcgcccctcggctccctacagcagtgcagacatgtcctcgaaatcctagcttaggtcatagatccttgatttcgagacagttttccggagtttaaaatcgactccatccgcatatatgcgcagctggaaccaataatcgcctgagcaggccttcattgatgaaaaactctgggttggtagtatctcatactatcgctcgttttgcgtgaaaacgtggagtatttgaggctgtgttgtcatcggtgagctccgaaacggtcattattgctgttagtatggtagtttgattcaattacagaatgagagcgtggtgcactcaagggataatgatttccttcgagtctcggtgtcaatcgcgatgtcagcagcaattcattgattacttcttggggcagttcagtggcccaccaagcttcgaggcgtacttttgcttcctggtgtcggcgagcgttgcatgagtcgaactcagaatacgcttcccgatgtagtcgcgtgtttcctcctgactcaggacaacggctcgtcttcattttcgtcgattggcctgtgtgagcctcccggggggtcagtgtggcaatgcgtttactgtcaccgatgacaagaatagtctgccggcgtttgggctccccttgacaagtgacatattatggtggctggacttcgtatacgatggccacgacgtccagtactctattcgactccaatgatgagagttctcccaaagtgcgattgttgagcttcagctgggcggcaagcgactccatccgcatatatcgcagagagctggaatcagttatcgctcaagcaggccttcattgatggaaaaaggaaaatcggcgatcgaactcggataagatcatctttctgaagttcggagcttcggttgagcaagcgggggcaagaaaaagagtgtcagagtctcgttgagctccagcgttggtttccgctcgtaacagcgaggagtagattaaggtatcaagagtcacagttcaatgatcaactcacggcggagtggatgagaaacttcactgagatcctgtgttcgacaggacgaaccgatagccgcactcggagctcgagatcaaccatgtttcacgagtctcctacgattcgcgggtaccttgctcctccttgtcgctctgatcgatcggtactcgttgatttgttgcaccacagcgtaaactttgggtactgagtttccaagtgcgccaaaatcttcccaaataaatctcaagggaattcaaccatatcagcagaacggtgaatgttgagatactcaagtacgcccaggccgtcggtcgaagcgttccccttggaggttcccgaagattcacggcggctcgagccatggactcgtaactcgcgttctcgaattcagtcgcctgcttggggttcttcgcgacttcgagccgtaacgtgattgcctcagagtcgattacgaattgacggaacattttgcaagcgaggagaaccgttagtccatcgatgaagttgtcggtgtaagaactctgtgagactgagtttattgtcgttctctgaaatcagtcctgagaactcctgaacgagctcatcgattatttggaactatgtatagtgccctgttagagtcctcctcagagagatattgagcctccctcgaggaggtgggcctcaagataacggaatctggcagttgctgcgcagagctgcagtaactcacgccactagttcagtttggagccgttcatggagcatagttttgcggagcggttccccactccgtgaaattggtgcctgtgacgaaattcaaggctgaggaacacgcttgttggacgaagtcagcgcgagcgacacttcgtcccttccagcaacctctgagcgcgtgttctgtgattggctcgtcaatgaagacactaattcacagacatcatgttcatcaaatctgttaagatgatgatcctgatgagccgcagattgaaggagaccgagtcgcatgcagtagaaatgtcgttggtgcatactgtcccccgaatgacacggttctacttcgcaaggagcactcaagagtttcggaacagaatgaagtcaagtagggaagcgttccttgtgacagaagttctccaagaatatgaatactgaactagtttgtaccggcatgattcaatgcggcggaggattccatgatcaccagcagctgaacaaagaaagaatcgctccagggctggaaagatggcaaggggtcgtatcatcctgagaacggcttatttctcgacgtttcgttctcgatgcgctccctccgcatcttctcgatgataccgaatcaggcaaaaaatccgttcattgaaattcattgattgatcaaaacaacccggctatgcggctgccgtatcgattcgacagctcctcttcccacccgaagattcgaatcatcctactcgtgttccgaaactggacaagcgtgattttcggctggaaaaaaagtcgtcagatcgatgcaataactgcattgccggatgattcggacgaatttcggaacttttcaccatcggattttttctctagaccggggcactcctgaggacgaacggggtggggggatctgtcgaggaatcagcggttttcaggctgatggcttgctctatctcaagtccgggagtgattctcgctccgttggaagggagggcgaatggattccttctccgcattcgaccgtaccggtacggactcgaccgttttacttttgatgtctcccggccaactaagtggaacgatgcgagagaaaaaaaatggttggtatttccgagattgacgggcgcgaactggagaccagaacacgcaacgtcctctcaaccatcgatcacaaaaaatgagtcccgacaaagatttttcaccaagttatgattagagcctgggagttcaggcatgattcattaatcaccatccaacaatccatagattaatgggtggatgagtggacagtttgatgaattatgtcatattgccatgagaactgataaattcagccattggagattcatttatccgcctccctacatggatagatcggaggaataaaatgatgaatgcccgaacttccaagctccagtaatgatttgcgatgctcacctcgattgactcgtgattttgaggaccgtaccctcgttgtcattcgctctatgcgactgctgggaagaggcattcccaaggcacgcatccgacaatcctcagtttgaacacatcacgtgcgcgtgaaggagcgccgcgagcaggagcagcacagatcacaatcccaaccagagaaggagtccagcagagcgacgcgggctcgaacagctgactcgttgagtctcaggaaaacagaaacatcctctattgaaaatgtgagtctgaagaatattgcgagttcaaataggagggactcgtcgatctgagcacactggatcgagctggcgttgatcgaacggatccgatactttcagcactcccacgaccgcgggagctactgagaaacatcagagaagaattcgcgacccggccaggtcccagaataggatatcggtacgattcgggtgagtccgagccctccgcaaacgtcggtcctgaactcggggtttccgatgttgattccgaattcaaggctctgatgcggcaatatcagtttttcaacttcacgaatacattttagctccccagcttcgagtcccgaaacttgcccggatggcggaggcattcgatggcttcgaggaacgggtggacaaagccatcaacgatcttgaggatgctctccttggaatcacggacgacgacatccgcgatgctctgagactcaaaggatatgaaactctgggggaaacacagttcagagatttcaaagatcagctgaaggatactctcttggaccgcctggttgagaaaagacgtcctgaaaatggagacgagtgagtttggacggggaggacatctgggtgttcggtcctcagaacacgctcaccggttttgaggcgggagttctgggttttcgaacctgaatctaaatctgctccccaggatggataccgcttcagagtcaacgagcaacagtgccgacttcgatatcacttgctcttcctacatgaagatcggatcaggagccggaagaccagaaacgaatcaggaagacatcgacagactcttagccattatgaatccaagcgaaggtgggtcgattcctccactttgccggaacgagtttattcccggcctcatacttgtatttaccctgaggagattcacatcgctccgaaagacctgcatccaccgatcaatcgatctgcctgtttccagattcccacgagctctatgacttcgatgacaataggagagcgtcaacattcagagtccagggagcgacggaagacgactttttgagtgcaaatccggaattcgcgcactcgaccttctgccgaaaacccagcactgtgccgtcggacgacagacctcgaaggcgaagaacgcgatcgttcactttcgatgtccagaaatgtgagtccgcagcatcttcataccgcagaaagaagaaatccttcgaagactttgtcagacgcgagtgccggacacagatggatttaatcaccgggtaaggaaacattctcaaccaaacatcaatggcgcagcgcacttcaatgaacaagaatctattggaccggatgtaccggattcatcccggaagttgatttgattttccatcgcagacctagccagaccgtgtgggtgccgacgaagccgaaatgctctccccaggttcgctacaaccaatacaagaaaatttgggagaggtttccgattcctggggacaagcctcgacgagagctacgctgggccatacgaaaccagatggcgaagaaagaagagccacagaaacagtcgtggtggcctgaggtgagattgccttgatcgaccctggaatctcaaacagctcaaacgaaggcgtccgtagcggcagcctgggctggagaaggcagttcgagaatcgcgaccctctccaactcaacaatgttaggagagactacgaaatgagttcattcggagcgaagattctccgaccagaagacgaacctcatcgtgcgaggagcactatgctcctgaggggaaacattggaccagcgatcaagtttcgtacacagggtattcgctccaacttcagcgacgatcatgatccagcgaggactcgagaaactcaaaaaaacggtgcagggtcgataagttggatgaaaacctaagacatccgaaaacttcattcaaggatgggtggtaaggatccttgaaatccttctcctcagtgcaccacgggcggctttgcgaaaggaccagactgagagagggcgagaagtgagttttcttcgagctcgttgagttcgagctggatcgtgtgccattaaaggaggatggaagacagatcgaacccattttggaaatccgttgagaatcgacgatccacgagcctgtcgcaagtcgggatctcggaaaaataggaagttcggctccaatatcctctcaaatcatcgattctcgacaaaattttgagaatacagacgggaaagaagcgtctcttggatccaggaatattcattagcagacatgtctgcctgggatatgtcaaaaagaaggacgagcatgatcgtcgctcacctttcagcgaacatcctgtagttgtaacaagccctgtcgctgtcggaactttagacctcacttctagttcaagattgtagacaacatgagatgtatatatgacgagccatgacaacccgttacacttaggaattctaccagcttagcaccaaggagcgactaaaatttcggcaaccaatgattgactaagttgatcctcatgcgagtctcatgttcattctgacgagtttctaaaattggagttgtcgctgtggaatagagaatccatcgcgggatgtttcgatttcgagttgcgattcctagattcctcatgcctgtgatgtcatcatcggtgagctcgacaacgcattttcttcccaataaacggaaacggaattggtattctccactcagaatatgtgattcccggccaggaagcgattcgttgctctgccgcgctattcccgggggtaactgggccaggagattccggatagaatatcgcagtgttgataggatgctacgccgacaattaacggattcatgtagcctggtctaaatccgatcgagctcaggaatggtcgaacacaaactatttcggtgaagacgatggaatccacttattaggaccacctgatcagaccatccataagacccctcgtaccgagatccctgtccatcgacacttttcctctgttcagtccatattgaaccagagatcgcacaatcagaccgttcactcaatcatcccggaatgggcctgtctcgaatcggtccgagaagatggggtacactggacatgacacacacgatggaggaaaggtattgtcggagatcttctcactctcggagtgatgggactggaaatgaatgatttgtggaggagatcctgctcgaactgagcaaaaatttatttctgaatatggccactccattgtccgaggcgtcccgaccccttaaattcgtgtccatttccgcctctggatttccaacttttccatgtggaccgaagttacccgcgagcagctttcgagtgttacggcacgtcgagtgctgttatgtgtgcactgagtccctattgagtgaaagagttgttggcacgagagatcatctgcaccagaaccgagcttcctactttcccccgaactatagtagacccctctggacggctcagcggttcgatccgcattctatcagaagaatcgtctcagccctacccccttgataaggatattccgaggaaaaaagtaaccataatcaagcattctcctgaatggctgcaatgagagcgccgagctttgtttcatcgcttgttacatttatttaagcagctgctgatctctgttgatttcccgatcgatctcccctcgaaacgatcacttattctggttactgagtggaatctttacgtagatattttcgaatggatatatataccttcattcgttttctttcgtttgtacacggtatgatacaggaatgtacagcagaaatcacaatagaatcacctgtcaatgttcgtatcactattcggaatcagagatagaagggtagatgattagatcgataagtagatagcatgcttgtttgcttgctcgcttgctcgctccacagtaatataggtgaatagatagaacgtgctgtttccatgtggggactcgtttcttcagtgtgtccccaagatttagaaaaccatcactgaaactgatgaacaatcgaggtcaacgacataacgcattacgttgtcgcactcttcaacgaaaattcctccattcattgggtccaactcgttcgtggtgaccattcgttccgcgagtttgatccctactctgataccacattctttgtgttttccccgtgactggattctctcataaaatcttcctcacttcgatcctccactgtgatgatatttcgctctctctgcatccttggggtcctcaatgttaattcctccattcatcccctcttccgcctcgactgctcacggttcccctgcctgcttggacttttcctcgcctcatcgtgcattcacggccgtcacggagtctttcaacgtgagtgttacaacacttaactctcatgattcccttcctattggaggaataaaactttcaacggtgttaattacctacagatctgcgaataattgactatgcccaggagacaagcgttcacgaaatgtttttcccaaacataagacgtcgcgctgtatcctttcattctgcaagactttttcagctatcacaggattaggtcgaagatggcggcgatgatggtcctgcttgaagtgactcttggccacgggacagggcctgactcaggagccgtttcgattcctcgtcccagcggatggcgcgaacattcatcaagtgggggtaatatttggaaaacgcatctgactccatagatttgtcgacgttgaagacgatctgattcgaaatttcctcgccgatggtcctcaagaagacgccgacatccgtaagacccgttgacgcgatcagctcgtcgagatgagcgcaagtcaatgctctggaaaggaggcgaagagagttccgtcagattctcgctaaaaaccgtaggatttcatggaatgaaaacagcggtgctacacgatcaaatggatggaagttcctcagtctatcgatcgaggtccgcgggagtctcgggcgattcgaatcacggctggaaccacccagccgatgatgcgatacgatcgaagatattttgagagtgaccaggcagttatgtgaccatccttgatcactgcccaggagtgtgacggtccatgattgaaacccgatcaaacctcggaaagcccaataatcacggggccgtgctctgcgatttgattgttctaaaatgctccgaacatgctcctgaagctcaaaccagaacaccgtgtcaggaggtcacgcccatcggggcacgactccagaaactactgtcggcaaagagtttagccgcggtggttgagcccgggtggcgaagggtcgaaaaaaacgagggaaaaaacgaatcggccccgcggtttttcgcaaagactcccctcctcggaacgagccgctcctgaatccccgtatatctggcgctggcaagtggttaagaattcacgccccgctgactcgtttcacactttcgttgcgcggaagatgagttggctcgtcgggtcgtccaggtgcggcaggccgccgaatacattccttgcaacttggtctaaatccgcaagaggatcaccgagggcccgcgttgtagtttaaaactccatatgtaaaacgatgggggcgcgcgatgaattcgcggagcgtgagctctcgagattatttcttcgttaccccagtcaccctcccctcggttactccgctcgttcaggaaacgagttgacaaagtatccgggaaacgggttccattacgtagcatggagccaaaatactcactgcagtgagccgtcgtccacatgtcgcagaactctaaaggttcggatcgcgatttccggcacttgcgagaagtcgggggccccttgtagaacatcgaatcccgtctcaacatggcaacggtctgtaagagagagaaatcgttgaccgtgattaaatttcctcggacgtggctcattcatgatcttgggtagagactcctggaacctcgacggagagcagctcgcagctggacagaggttctcttgcgccgcgggaggaggaaggatggcacgcagccaggcaggtacggaagaagggaggtaagtcaggaggtagggcggtaatgaatgagaattcgagaataaagtgatacatgagaggattcagcatcggagagatgttgaacgtatagggtgaggaatagcagagcgcctcgatggttctttccctgggtgcacactctcagtgaaagccacgtcgcgatggagagtgtcctaatccgctcctcgcttaccaagacaaggagcgtttccagaaaacgtccaaggtatcctcttcgaacggatattgccatcgatggcacctagctcgtcaacaaacgaattgtcttcgcagaactcatccagtaattgtttgataattttgaagtcgagcatccccgcgatgttgctggacgtctcacccgaatacgtcttggcgtttgcgtctgctccgaacgacaggagcagtcggactacctgcaagatcatcttcggcttagcaacatagtcacctggatgggaactctatcgacgcggatattaagtgaaaaccgcaaacctcggtatggcctttcgctgcagcttcgtgtatgggtcgaagacctgtcacggtttccgcttcggtgtccgctcctttttcaaggaggatcctggcgatcgtcacgaagccgttcgcggccgcttcgtgcaaagccgtggtattgctccggcctttcagattgatgtctaactcgcaacaacgttccaggcagaagctcaccatttcctggaattaaactctgggatcagaccgcgatgggcttggctcgatttccccgccatcctttgagcgtgtcaatcgattcatttcagtgtgggatcgtttttcccgccaaaataattaacgcggatccctacgcgggtaacggcttagagaatctcattttctgagttcactttcagagacaaaaatcaccagggtgagtggatcacccacgcggacgacgacgccctacggtgcatgttctctcaggacagggagaacctcataattcacccgtcgcgctctcttgtcgtcgaaacatgatgaatgaggcgagtttttaatcaatcccatttgatagcgctgtgtaatcgaacggcgtcgcacatgggattctgaaacgctggggcgatagatctctaaaagctacagcgggtagtggcatgaaagactctagaagctttttggtcattcagtcggtcggtggccatccgagagatgtgtcgccgccgctgtcgtcgtcggttgtccattctgttagccttttcctctgcagagcggtgtcccggcttcaccatcaccagaccgagcaagagaaagcgaacggctgctgtggaacgaaggccgtgtcaagtgtggtcatcgtggcagtcccgggggaagcctgctcggctgccatcgctcagggagagtggtcttctccccctcctgccccaaactgtctgcctgcgcgtcgcttctccctccccggggtttcctgtctccggcgctcgcccgcccgccaccgcttgcttcccctttctccctcgtcgctccatgagagctcagacaggagtcgtccactcggacgctctacgacgccctgctgcccttgacagctcgcctcctcccctccctctttctcttggccccgtgctgcttgaatggctgactggatggagagttggagtgccgcgtctgccggggtccccatcccgttctcctgagccgctccgcaggccgaatgactcgttcctgcaacggcggcgacggcagcgatcgctcctccaccgaaccacttgacaaagccgtcgccgccgctgtcgcagcgtacgagcggttggtctgttcgcccgcccgctcgctcgctcgctcgctcgttcctcagccggtcgactcgccttcccgtcccgtgctcgcccgccacgactcggcacacagagccatccaaccgccgacttccacggtcgccgccgctgccgccgccactttccccgccatcatcaccacaccgttacctcagtcgctccgatgatgatcagcggcagcagaggcaagcgctgaggccggaggcaggttggcagccaggagtagcggcgaaggatcgtttctccgttcccgggaacagattcgggagagaagaatgggggcccgaaagcagccgcagggaacgccgccgagggagaagagcagtggccgacgaagaacggaggatcgatgcgatttatcagccacctgtgggatggctctccgtgcttcgttggctcactgacagtggaccaccgcggcgcaacggggcagcgggagcgccaaagtgagggggcgatggggaggggcacgggggtcaggacgaaagccttgagggaggggaagtgaaagcggtgggtgggcgaggaaagtgagggcgcggggggaaagccgcctgccaagccgagagcggagacgacgacgacgagaagggctgacgagtgaagatggccgaggaggagaacaaggaaggaacgacaacgaccacggtcgctgcagccaacccgcccgcccgcccgcctgcccgcacccatgccgccagtcagtcagccgagcgagcagggtggagcgacacaaaaaaagacgactaaggaaaaagaagaagccgcccgcctggcaccgaccaacgtctgctctttattagcgccatctcgctctccctctcgctgttggtggtggacggcgacgaggggagcaagccagcgacggactttggaagaagggacccagcaaggcaaaaggccgccggaccgtgggcaacggcaaacaccacgacgactgggagaacgtggcggcgcagatcttttctcttttcctcctcggtgttatcaccgtcggcgctgctgcgaagactaccgccccgacgaccacgacagcggcggggacggccagcggcgtcactgccgactgtcaccatccggcctcagcggctcctttcagcgcgttggttgagcaacactggcggccgccgcgggaatgcggggggattcggggcggcgggggaaagcaaacagcccgcccgccagcgggtgaatcgagggaaacgagcaggggaacgcgggacaaagccgaaaatcgcgggcccggcgagctcttcgtccccgagtggacggaaggagttctttgttacgacctgatctctcgattcgtctgtcgctctccctgccggtcgacgagcagcagtcactccccgtggagccgctctttattggaagtcaatgcatctatcttgctgggcggctttactcgccgccgtcgccaccgctcacatcccnnnnnnnnnnnnnnnnnnnnnnnnnnnnnnnnnnnnnnnnnnnnnnnnnnnnncgctttaacccccagctgacggtcgacccctggcggttacgccgacggtggaggctttagtggcgacggtggcagtaactccgaaagagctaagagcccggagctgaccaggaggcctggccacggagtcgacaggaggctggccacaaaagattgtggcgtgcattggttgacctcggacggcccgcaacgggtctggtgaaatggcgatcgatgctcttgttgtgcccgcaggccggtggtcacgacggcggacctgtcttctcactcgcccgtccggcacaccgctcggacatccggaccgacgcacgggggctcggctcaagcgagcggacgagagaaggcgcaggcccggagcgttcagatacgcctacgctcacaaccgcggctcatgccacgggcagggggagggactagtctggggagctgggcgtggagcgtgggttgacggacaaaacagaggaccgccgatgtaactggctcgaagacagagaagatctgccattgatcgtgttaatcgccggtgtcgtcgacgttattgtcccttatcagcgaacagccggagcctcgtccactcgtagtcgacatttttgctcgtttcgagtttttccgttcttaagtattctgtgcgcctccagctaactccgaaagcgccggttcgagaacgccgaaaacttgggtcaaagcaaacatttttccgctcggccgacactcacgaggtttcctgtgcgggccgctcgatgtagcagactctcttgctgctcttggtcgctgactgccgacgaggcgaggcttgcgacagacggtgacgttgacaccgatgcgccgaccaacgcggatgctgatgaagctccgtcccatttctgaagcacttggaccagccgcttcttcggcttgaggacagcaggtggagttcctcgagattctacgcaggtgtcgggtgaagccaagcggcgcttctttggatgcaggctgtacttgaactccactggaaagagatcgagggatggatgttaaatggttgtgatatttattcctcacaaagggttcattcaccgggacccgaccgacccgagagcaagtaggagcacacggagaggggtccaagcagtcggtcttccaataaactcggaacacagttccgaaacgtagccccacggtggagaggtccagtttcgatactcggaatgaaagaatcaggaactgacccctcgcgtaacgcggttcgcgacttctctccagtcccgtttggcgttcctcgtttgtctccttggcggtcggtcggtcggtcgcacccgctcggaaaggcagctgttctcccgtcgctttgcagcttatccccccccccctttccccccacaaccgtgtctcacacattccccttgctggctcctcgcctcgttctcctttcccctttttgcgctctcctcggggagccctctcgtttcaagcaggcagtgtgactccttgtttgcgtcacagacggcctcaataaagcttccgcacgaaagcccacatcggttcgctgcttccagactgaggaaacgagggagcggcagggaatcggacgagagagagaggaagccgcggacgaaaactgaatggaagccgccgctcccaccgcagcagccgccgccgacaacccactactcaccaacctcaaacagcgtgtccttggctcgctaacaccttgctcggctcgtccccgaactcagtccgaccgacggcaacaactcgcataaagcgcatcggctggccgagctccgcatatagggcaagctttccggtccgattcgtgtcgtgacggcgtctgcggtcgcgagcagcgcacgcggaagtccgcgccacacgtaagcagggcgcaacgggccggaactctcggttcactcccgtacgagaacgagttacgtccatttcttgataacattcatccgactcaaattcatccgccgccgagcacacatacggtacgctatagacaaagtgatcgaagcgcgtagatgtctcagttgctcgattcccgtctgactttccgttggctgcgaacgcagtcgtctcgttggaccgttcccctgctcattccttatgccttattctgacccttttagcgcttgcgaatcgcgacccctcgccccggtccgcggctccagccgactgctgtcccaggcactctccggtagatgcccttgttcccttatagtcgtcatacatccagcgatgctcgtttccgccagacgagacggccgggccaccggccaacgaacggacgagatccaagggatcaggggagcgccagagagcacggctgcttgagtgagcgactgtgtgtacgcttgtgtgtggtcttaatcgggcctgagtgaactgctgagccctaagccttggcggcggcggcgggctcggtctccgctagaggccttcccaaacccgctcctttacccaccttgtcccttattgcgcccaactggcacgcccccctccgcactggagcctccgcactatctcgctccctcgctgcccgcctacccgactgaggcttcttccacgttgccttttgccgatccgtcggctcgctcgtggccgccgagaccattgcgttctccgtaagcctcgacggctaactggctgaatggctcagtgccctctggtttcgcgatcgatcgatcggtccggttccaatcgcttctaagctacatctccggcaccgccaaatcccagtcgactttgtcggaggttcatccgctcgccgcgtagccatttatccagtctgccatgaacgcgagcggaggtacctttctcttttcaattccctccattctccctccagttagtctcgtcctgatggtgacggcgacgagggagggagagagagaggaataagagagtgagtgggagagatgccgacagttcctcggcccgagtcgcacgaccgaagctttgcgggcaaaactccgacgaggacggttcctggagtagggagcaaaaaacggaacacgctctaacgagagtcatcgtcgccaaggttgacgttctaagagggaaagcgagggagcgttgccacttaatctgcgctgcgctgccactgatgccccggccgcctcgctggaaccgctgttgatgttcgtccatgtccccgacgaccgtgatgatgatagttgacgacgatgtctgtccagacgtcacgttggcgcaccaacgtcgtcttcgctgcggtggtaatacggtcatcgtgtggcgcgccgggctcctagaccacggtcgttttggtacacatccgtgagcagcatttcctccggcctttccttctgcggaggggcagaccccatcatcggcgacctggtggcccagaaccccctgctgaggttatcgcgagtctcaccgagacgaccctcgatccgatgtcggcgcgatcaggcagagaccgagcctaagtccacgacctccgccccacttcagccaagatctgacccttcccgctcccctagtcatcatctctatcctgccgactcatcgtttttctccccgttcgttcctcgatgttccagtcggaacgaatgttctggccgacgagaacggggatgcgacggcccctgcgctcgccggattttgacagatgcggacccaattactcgccgcaccgattcagagatggctggtcgtatcgccgtccccgctccgacgacattccctctatgaaccttcctgtccattgttggtgggatacgaattcttcgccccgtttccgcgtaaagagcactcgtcgcaaggaaaacacaaattcgaggtcaacaagctggcgacgaacaccacgactaccacagagaccaactgaatggagtattgagagaaaaattctcttccggaccatcaaagcagcccgcggcggcggacctcggtcgaccgtggcctcaagcccgagcactggaatggcgagatcgatgtcgcgaactgagtgagtggcacacctcgattgttttggaagatcgcacacggcgccgctcagagaacatgatcgtttgtttgtttttccattcactcgtttttccgagctttaccaaccctcctccgttcggaaccatctgttctcgtgaatctcgacgcgaacccctgcccgcgagtccgcactccattctgcgaatggaaaacgctctgctcaatgcgaggtgtgcacctacctttgacggcatcatctttgatggcgggcccgttgggctgtaaaagaaggagtgagacgtcagaaaccgacttggtgaatgagtgggagcccgaccaagcagccaaccgaccgactgactgactgtgtgagtgttttttttttcaatcggctaaagccggagccgggtagttcctctcctttcattccagtagcggtgccagtgtcgtcgtcgacgtccacgtatccttgaccgcggcaccgaccaagcccccttggaaaccctctgctggcagaaaggaaggcgacggattcacatacggttccaccggctgctgtgcgacggccggcgagtagatggcgaactgcgggcgggcgtgcgagcgtgcgagcgagcgtcgacaggaagagtcaaaaggaagagcccggaggccccacaaagcagccgagcagccactttcggctttctcgttgccccatcggctcgtatccgccctctgggcgtctctccaggctgagttgacggacggacggacggagccaaccatccgttcaaacactcacgccctcgttcgtccttcaggcggtcgttgccaagtcaactagccatcagcttggcggactgtcatcagtgctaaccgtcgtgaagctagctccgctggccggcctgcctgcccgtccctctccgcgtagactcttccagcctcctccccgccccttagcctggcctggtcccgacgccgttgtagcgaacgaccgtgcctcctttcatccttcaaaagggagacgctttcttcttcgttcgtcgtcttcgtcgttcgcctcgtcattgccgccaccgccgtccttttcttcttagcagccttccttcatgagagagagagagagagggagttcgcaccccaagctcgttttcgcctgcccgaccggtggagccccgcagtcgggaaggccgacggacgaacgggccgcgttctccgagagcccgaccaccatcgccgccgtcgccaccactatggtaatttggcacggaaccccctcccaccctccattctgccgccgccgctgctattgccatcgttcccccaaacccccctcgtctttttggtacctcgcttctattgccctgtcccgccctcaagcgcacggcaaggatcctggccttcccgtggccgccgccgctctgctcctggtcgctgtcgttcgctgctaccagtgcctccgccgaaactccaaatatatcatggcgccgctcactctcgacccaccggcccgcagaccggctgccttcctgccgactccataaaaaaggcgcgatgagtcagctgtgcggggctctttcctcttcgccgcttgcttgcatgcttgcccccaccgagatgccgctcccgtccgagtcccccgccgccgtcgccggcttcatccaaccagcaaagccaccaagcactcggggagcgcgcctcccaacattgccgctcccctcccgcccgcatcgttcccgctgccggctctggttctgctgccgctgctagttttcgccgcgctacactccccggaaaggaacagcgttgcgatgcgcccccacaaactggcctttcttcctcttctttgcccactcttctccgtcgccagggtggctgccggtgagggagcaaaggaataacagcggtagagcgcgcgaagagcaccgcgggaggaggacggaatcgacaaaccgccgagacacttgaggttcgttgcgttgcttgcgctcgtttccatccttttccccctcccctctcgccggcttctcccctcgcgaccccacacctccgccgcgcgccgcgccaactccgccgcgctccgcaccacctccgccttctgctccttccgtcttggctcgcctgactgctggtcggtccgtgtgtctgtcaatctatctgccagtccgtctgtctatctgtcgacccgtctgttccttctcgcagctgactacatatcggcttgtgtcttttgtctgcccttgttcgtctcctgagcgaaccaaactgtcgtcagcgaaaatgagagcaagcggcgcaacgagtagaggaatttctcaaaaggagagcgacgaggcaggggaggggcacttcagccgatgcgctaattgacgggggaggcaaccaagagcagggcgaggctcgcctatgtaagagcaaactgtgtatttccccctccctgaattgcgaggcagtaaacggatagcgacagccacaaagagtcttgttactcaccgttgacgtggaactgttgtcgtctggcttgctgagcgcttcgatgttgaacggtgtctttttgggtttgaccacatcgtctttccagggctggaacgttttctcggtcttcgggctcgttatctgtgatggaggcttaggttggatgtgtagctgctgttgttgatggttcagagcttgttgatgctgctctacatgagattgctgctcttgtttcacactttgctgctgggtcaggttttggtgctgttgatcatgctgttgttggtgctgttgttggtgttgcgatttcacgctcgacgaagttgggacgggaatctgttgctgatgctgctgttgactcgcagcggtctgcgtgttgctcgtagactggaaatgtttttctcttatctcttaggtgtgttgagtataaaaatcgttcgttatcagcagaagtgatgaacagggagaggagctgggaggactaggagtcatgatggattgaaacgcaaaacacgaagcggctttttctcatcgtggctggatgaattgtactgctgcacactcacctcgtcgccgcgggaactggcctcgaaaccccgcgcggtccacatggacgcgtcaaaggcgggaaacacggggggcgcggggccgaactggggcgcttggcttgcgaaagcgtgttgcagacttcgagcgcgaaacatcgccacaggatccatgagcgccgcgtgacaggagaacatcaacgccgccagttgcttttgctgttcgaggaacgcagaactttgcggcggcaaagccaatggggggcttttgctctcggcaaatcctttgaggctagacgacagcgacgaggacaacgaggatgaagaggacgactcggacgggatgacgggactggcagccccaccgccgcagcccagaatgctcggacaccattcggaaaaggctccactcgacagcatcgaagccgccagggccgctcgttgctggtcgaataaatctctggctagcgggggggttttcgacgacaagtccagcgggaacgtcgaagcgctttcagtcggtcgggccggggaccgggtcactcccgcactgcccaaatcagcgaacggcgatgcgaatgaatagtacatgctgggtatggagcgtcacacgaggcgccgaggttgccactcacctcgccgcgcgcagttcaggctcgcgaggtgcagatcgcctgtaaaaaagaacgaaaaaacgcctaacaaagtgaatcgtatccactccgaatctgcatcaaagatttgaaacgttgagcgagatacttcatcaagcccaaacttggagtcccgtggtcagtctgtactccccgtatcccttactatgggcacagggctgcacggcaagaaccctcctcagcaaggtcaaagcctggtgaagacgatcatcaattctggctgacgactcccagccatttgacgcgtgagctcactgaatatttgtactacgacgatggcgtgaacgttttcagagctattccgctcccaacacgcaagtgccatatgtcgtgcacttagttgttcacttagttcagctccacgagctctaattctccataacgagcgttgtccccctcgaacaagacgattcaaatactctggaaaacctcggcgctggagacaaccgccgcttcggacgctgcgctgtctctgtgttgctcaagttgcccatcgcgtggtcgccccgttcgccccacttccgtcgttctccacgggaacccgtctggagacctactcgccgaccgcgtatacccccatgcttcccgcttctaagggctgcgctcgcaccatcgccagggtctccgaacgctcgaccgcgtcgtcattgctgccatcagaaggaggagatccgaccgtcgggggagaaggagcagcgggccaaccaccgacgggtttaaactaacccactcggccgctcagccgtcgatcggtcgttgactgctgcttctgctggcggctcatctcgacaagtgatcgtcagcctccggccggccggcaagccagccgaccgaccgaccaaacgtacgtaccaaccgagcagggttgtgaaagctgcagcagcaatagctgtgcagacgggggagggggttcgatcggtggagccagccgggcggccgaactgcaaggcgtccggccggtcggacggacggccaggtaatcagccccgcagccgacccggcagccagtcgttcccgcagccaacacgccagtcagtcgttcccgcagccaacccgccagccggccaagccctcatgcgactctggcacatcgttcggttcccccgttggccaacctgctcgccagcccagcaagcctccgggcagccgcaaaggaagaggagcctctgacgtgcgaggtcgcaccgtgggcgaccggtcggctagctggcaaagtggcagagtagtgagatcggggtaagggggttggtggc

SEQ ID NO: 89 - DNA, 4432 bp, Phytoseiulus persimilis
  source 1..4432: mol_type = genomic DNA
  variation 1032: allele = g; note = SNP_28
gcgccggagggggaagcagcatgggaagtagcgaccgggtagctaagcgagccggctggcatcccttttgcgatgagtggatgggggagccagatgtaaaagacggcgggaaaagggagaggggtcgtcgcggaataccgagaccatcgagccaagagaaaagacgaagaggaaggctcgacgacggcgacggcaaaaaggggtcaggacggagaagagcggaaacgggaacaggacggaaagaagcggcggagcaagcagcctaagcgacgaaggcaactcaggcttagcggtggtggcgtcaacgatgatgatgacgatgctgctgccgttgacgacgaagacgactcccttggaaaagaggacagagcggagaccgccgccgctgccgccgacgacgacgacgttgctctctaaggtgaaaaaacgagaaaggagacaatggaggaccaaccgactggtcgacctacgaaggagaggatgaggcgaacgacgcagaaggacagccgccagacagtcctccgaccgttccgccgagcgatcaacacacaagacggatattcggactgagcgcatccgcatgaaaaacggacgtgcaaacatccgatcgaatcgatccgtgaacggataaatagaaggctccagcctcggtcaaacaacgagactcaatgcgagaattctttctccctctctccataatttttcttccctttctctctccatctgtttcatcccctcagaaaacacgaaaagtggtttcgtgcggcaggtgtcggccgacggcgtttccagctcgggtgctcgctttcgctattgccgccggagacgaagctctgccctcgaggtacgaaaagagaacagtgggactccgaaagggggaggacgaacgctcggcctgtgtcgcgtgaactgaaaggctgttggggacagagttggagccttctgtggagagtggagccttcttgccaaagcgataaccggtcgcccagccggccgcagagtcgacccgccggccgaaaaggcggccaaacggttgcggtcgttgtccagttggcaagcgaagaggcaaccggttgtctccttcatttttcttgccgccctaccccgcttcacccagtcccccaccgctcgaagaaaagtgagtcaactagccgacgagcgaggcagttggttccgaacaggccgtcggtcactcaactctcggctgcgttgcgccgaacgcttttattctctcacccactgttcattccttcgagcgaagtctactccggggtttttcactcagactcgaaagcgtgaatccgctctgcgcggggagaagaatcaaaatccatcgagaagaccgaatcgtgcagcaaatgatgaggaaagattatccagaagtggttttcgagctacatctcaatccatgctttcggagaatcaacgtgccctcgcaccttctcctgtatcccttaactttcccctcgaatgtcgactgagctcgctcgtttccccaccgcgggtcggccgagcgctggatgatgttgttgtttcaccgccgctcgcctttccggctgccagccggctcgcacagacgggggggggggggcaagcgggcgagcaacaaaacagccaactgtctcgtccgctggacgggagcttcctccaattaccctcttnnnnnnnnnnnnnnnnnnnnnnnnnnnnnntgcccgtccgcctacccgcccattcgcccgcctgcctgtctgtctgctctgttggctggacggacgacagaccgaccgaccgaccgaccggccggccgaccaacgaaaaagactgacatccgaagtagtagcagcactgaaagtgaggcccagggaggaagagaaggagccagtcagtgagctccggccatggtggctgaaggggggcgggggagggatggaccgacagggacgagaggtgagcgagcgagcagacggacgaccgaggaacgacgaacagcaacggaagggagatcacttcttcgctcccacgttgtcgtcctcttcgccattcgctcgtccgccggctccccgttggtctgtgagtccgttgattcgttccatggtgggctcgttgaccccccgtccgtccgctcggtcgctcgactggctgtcgacttgttccgtgccctcgagccagtcaccgacgctaggcaagtagacggtcgtcgggctgggcgatcagacgagcgcaagaaccgactgtcagagcgaaccggcgggccagccgaacgaacgagctcaggctgtggaggcccggctcgggttgcttcggctcgcacatatttgtcgcgccacggaagccatggctggggcggcgccattccgccatcgcacccggtcgacgagcgaacggccgcacagcggaaagcggacaaacgccctggacgaacggcctttgcgtttcttacgaccgccactggtcgagttactgcctctagcattatagcgcttctaccgctaccaccgggaggatcactgcttgctttcgtttccatgagcgggacatgagctctcactcctcgtcatcaagtcctgttgttgccttcctcacttgccgagtcctcccccgccgcctcctgcgcttccagcgggcgttcgcagcaacgaatttccactcccgatggaatcccagtggttcgttgtatggagcggttcgttgaaacgagcgactgtcttttttgactcataattcagggcgtcgagagcaatgtagccccgtgaaacgcggagttccgatcgttatagcgagattttattctatgtgtgcgccggaagcgcgacgttgctgaacctgatgagcttctcgctcctcttctgagtagttactgagtcggccaagtaatcgctcggcgactcgctggttccctcagcgcttatctctccgctcgtctgtttgtctcttgatcgaccggccatcctggccctcttatcaccggaacggtcccctccttgcccaccccattcaaccacccgcggcagtccacgcggtagctattcggtgaacggagcagacgacccccgcatcagagactcgatggaggccccgtagagcgtttgtttgtagacttcacggaccctcgcgcagggaccccgaagatccgggccgagatcgttttaccgaacgtggcacagacctttcggttctaggcgtgatggagacccgcctgtgagtttgctgactgagttacccggcagacgaacgaacaggttgctatacgagcgagtgctaagctcgctgccggactaggtgccgagggtcgtcccgtcgtcagaaccggtggtcaccgcgaacaacatcgctggtggggtacggaagggggaggcgaggctgaaaggagtagcggggggcagacagctgcgggcggagtcgctgtgggtgactcgttggcccggagcctactgctctgccgcctcgctcgcagatttcccgactggacgatgtggttggctctcctgttcgctcgccctccatcgcagtcggctaactcggtcggccaaccgactgagcaaccgcccgcgccatttcctcaagctcgcaagcccaaccatttgctccagccaacgtcactccagcgagagcgaaggaacgagctggcgtatgagcggtcggctgttagcttcactagccgcctacctccggatggcccgacggttgctcgactacttgccgacttgagcgctcacttcctaccggacactcaatcggcgacgccatcgatccacgggaccaaagtctcctgcgacctgtcagctccactcgatcggtacactcggaaaccggagagcgggcgacagtggatgaacgaatcgaggaagcagctccggtggatctgttgagcacattcaccacgcaccgaaccacggatccctcaaaaaaccacctgagtcaaagaaggactaatggggtccttggcgccgcgtgacggactgcccgaatgatttttcattcacggctgccttttcgacgagctcgtcccgattagagccgcatgaactcgatcgagtcgttcaatgaaacacgatcggtcatgtttgttccaagtttcgagcctccccgctgggggccacttcgggcgccgtttcgcggcacgagtcccgactcgtaactcatcgttctcctccatccattccctccaatgcccttgttctcgtcttcctccgccgtcctaggcgctgcgctccctctctcaccccgaaaccgactttgcgctcgtccgtgagcgagtgttgatgtgaccatagcttactcggtgaacggccgcctatctgttcgatcgttgtcctagcgctcgccgcactgttagcgcggtggctgacaaggcgacttactgcctgccttccgatgcggcctggttcaatcttcctcgtctaccatccctcactgaggatcaacccctcgcccccatccccctgccacc

SEQ ID NO: 90 - DNA, 361751 bp, Phytoseiulus persimilis
  source 1..361751: mol_type = genomic DNA
  variation 173977: allele = a; note = SNP_29
  variation 228195: allele = t; note = SNP_30
tcgatgagaacaaaaataggaaacgttcccgaccccgtttggctattctagtttgaggtctcaagagcttcgctctgtacaggtatgtttatgttcgaggtccgttgtggctgggagtgaccctctgttctcctcccaacgttcctccttctgacggacggctcgtcctgtcggagtcctggtgctgaggggaggcccgaagagctccagaagtttcttcgaggcggtggatgacgggtgccacgtccgcaacgtaccgggaagtcgttccacggtccgagcctcagaccccgtgcgggagcgaaaatcgaacgaacagacccgacgacacagcgaatcgcaaacaacttcagcgagcacactcgagggatcttgttccctcgcggaaggcaacatcacgtaggccaacaagaggactagcaatgattattttcgccgggttcccccgctccggaatctgggcgaacgatgttcctgttgctttcgttcgctcgttgtaactccacgaacgttcggtcgcgcattgtcgaagcaagcattgtgttcatctcatatgatcacggagccctttgctgtgtggattttcgtacgacgagcaggaagcttgaaagctggaagcatagctctttcgcctgctgcgaaccttatgtcgcgaggtccgtcggctcgagcgagaggaaaaccagggctccccttgtcgcgaaccgcaattctgtcagaactcgattggcggcatccgtcccctggatgaggggggttgtagattgggcctcgtggttgttgtccccgcgaccactgcttcacaaccgaacccgaagtgcatgcaaaggtctcggcttgtgtttttacgaaactctacttacggtggttccgctgacctggctctggaattatgttctaaggaatgggtgaaatgcctccggattctggtttactcaatctctcaggcgaccgtcgtccgcggaaggtcaggcatttctgttgataactatatgggttgttgaagctgcatgctagaaggaatggaaatggagaacgcggaggatgcggcgtcgatttttattggattccgagaagattgtcgatgcaggattctagacttactcgttggagcggacacactctactggagttgggtccatctgccggtctgggattaggccaggataatctacgagggccgtaagatgacaccatgtggaaaagaggacctacgtcttaatttgggacactcgtttcgggtggcggtagtggtgtgctgtggcgttgcaggtggtgggagccgccaccggatacgacacttggaattctctgtttctgttacgaggaatcaagccagccagttaaacaggttcgctctggatctacagagcattcgaaacattcaaggattgaattcgagggcgaggaccgtcagcttcggagttctggcttacccgattctagtcacgtgcgattcttctttatccgcacccacaaacagactggcagaagacctgcctctcggctggcgcacatgtttcggatcgggaggaggcccgtctgggtcaatatagtttggaagtggtgagaaacccgccatttgaacagcaatagcacggaatcaactgacggcctgactggcgagcgggcaggtgggcaggtgggcaggcaggcctgatgcgttgcagtttccgagctgactctgcgagaccaggtagagagtggaaagggcagacagcatcagtcccccgactttgggaaagggagcagtgttcgtcggtagacccggaacccattctcccggagcctgtcgaacatgatgagtggacatgttgtgttgcgcatcgcctgttccggaggccccgatccccagccccggcgtacgtggctcaagaccctgaagctcgaggagcatcgcgcgagattcactcctctccaactccgagaggtgattcgcgatctaaccgagccgtgttctgaattcctgcggcgatggtaccagttttaaatgcgctgcaggtcagaatttcgtttgggaggtttgctcgagtctcgcgccgtagcttggtggggagactttttctccgggagaagggaagggagagccctttcctgtgcacctgctgcagcagatcccgccgcacccaccgccaggttacaatgcagcgttttccctcctcgtggtgcagagaaatggcaggtttcccttcgcactcacaagcctcgcttcaaagcgattcagtcggtcggcacacagaggggagaagttttcggaagatacgccgtccgaacgcggaattaaacgaaagctctctcatcgtcgacaggttcttgttgctgcattggtcctgccgcgggcgcaacagcgtgtcgaaagttctcctcagccacatcgatcgaaacttccctctcaaccaactcgagggggatgtgaggaagattcggcggaggacagccatggcgatcaaccgcggaagatcaaccgtccgacgaacgaacgtcgtgagatcgattcctgcggaagaggaaccgaatagaatcattcgtggccttcgaagcccttccttgctgaggaatgaatataatctgaggagcgacagttgggccgggcttcagttgccagttgagagcaggccgacgttgcacgacgagagcacgccgcggaatgtcggcagcctgagacttgaccttgctttcgcacaataatgccgctgcatcgggggttcgcgaagcatcaccgtgagctcttcgtcggacgagaataacagcaagtattgattcctgaaaatcccgcgccgttcctccgcaagcctcgtagacagcgaagaccgcacggtgttcgcaatttcatgggatcggggcgcagtccgactgttcacatccgaaccgcgaatcggttcctgtttttgagatcgcgttgggatgccaccgctcgggagcctggaacggccaagggaacgcacggaaaagtttcactgcggacatgagttcgtttttcgcaaacggcgttcggcagcccagctcggtcgtcagcgctgactgaaacatccgcatccatcgttgggaagaactgagggtcatcctgccgcgaaaacggctttgtttgatccgagcttgcctgagatcggtgctggcgctgcggagaaacaagaacttcagctcgttcgctcgctacactgttcgtttccactgtgccactgacaactccctattatcgaggtgaacgtgcgccctgacccaaaaagagaattcgtcaactctcccgactaaacgcggcctgcgtttcagacgcggaatgaaaacgggggcgtacgagtcgttgttgcggacacagcctcatgttagcagcgagtcgctctctccgagagtcgggataatacgatgctggaagggaagaaagaccggagcggtggccgatggatgagtgctctccatggtgcgtgcaaatcccgtccgataccttggcgcagtcccgatcggtaggtcgtggcctgagcggtgagatccattctcgttctcttgcgtgtcagcgtgccaccaagccggaagacatccagcaggaccaaacgacacccccagcaccttcttggaagatcgggctgcagaagcgaaaaatcaggatcggtcctgcaaatcagaacctgttttgttgattccacctcttgcccaaggaacgcatctcggctggattccattcaaagcgctggcagcagatttcgcaacgatctgattcgatttacagtggttcggaagtttcgagtcccgtggagcctctcgactcgcttttcaaattctattagctcggtttgagttcggagtcacaccggctgcattcccgaaccctttctccgggcttccctctgcaactaacctagttagcgtggtgtcacactcattacaagctgttccaggacaagctcccggatactcagcgggcttaagcaccaacagatccgtacttggaggaatagcagcgtcattcttccggtatggacggtgcgtgatgtcgagggctaacgatcccgttccaccctccccactgcgagcatcggcattcgttcgacagcgctcgcagatgaactcctggacagagcagccttgtggatactcaaactccgagcgctgctgtcggaaaacaattcaggccaggtagcgatttacgctcccgagagcagttaagcgagaacgtttcctggagcggaatatcggacacgggagaaggagcgaaattactgataatattctacaacctgcaagaagtgcctgaaggaggtagaatgaaaaatataatgtgggggaaacagtgagtcacgatgaggagtaacccacctatggcataacaacagcgagaatagctgctggaggaaactggcgaatctcagctaccttcctgtagctggacacctagccacagggagaagcgacagaagacccacggaataaagtgcttgacattttggagcagatgttcgagctgaaaatcatgccgaataaaaaatatggactggcctgtatcgctgcgaaaccatggatgaccacgaaattggcggataggagagcatttgtttgagtctttggttttggcatcgacacgcaaattcgcactctgtgtaaccctgagagcagcaggatacacatccgatgcgtagaagggagactagaaacagactcgaggacagaagtgccgcctaccacaaggactccgcgacgagacgagcatcacgcagacaagaatggaaacgtcagaacaggatggggcgcacattgaccgtaaaatccaccatgtatatcaccacagagtttgtacgaggaaagatttatctgatggtactggggaaacgtgcacctgtgaataccgtgactcgccgaaattcagtaggtaccacatgaccaaatgtgaatattgggtcgtcgaggaagttagtgcggtttcctgggtgaaattcagggcagaaaaccgcacgaacttttttgacgactttacacttcgagagctagtcagtttgtgagatttgtgcgacggaaattttacaaaccaacacacagatgagagaagcactgtcgttacgaggctttgcaatggtgatttcaccgcggttgataaccgcaagaaccgcaaatattttgcgatttttgaccgcaaacaccgcgagcgaattgcggtcagcactcatgacttgcccggagatgtctcttgatgttccatcaacaagctgttcaaggactccacgagcgagcattagcggcgaaagactcaatcttccagaactttgcacatctggtaggatccaggagccgagcacagtggatgtagctattatgtggattgcacccgcttgaatgaaggcatcgatgaaagaatcgtgatgaagtcctgcaaaaaaacggggatcactcatgcactggtcggaaccgaaagaaacgcccgttttgaagaccataatgataacatacggagccgggagcagtttcttgaagtcagaggaaactggaagcagctcaagagaggacctcggggttcgccaatggaaaactcaagaaacaggacgtcgaattcgagtaagtcatcccgaaccagaaaggaaaagcttgcgtttaggcactctacgctcctctctcgcccttcaacacaagtttctctcttttagactggaatattgtgtcaaggatttcgtgacttggaacgttcaaccaatgttcccggtcccatctcatcaaggtcgagttgtgacaaacgagttctttataagatgtgttttgggatctcgttgtatcctcaagttatctgaccttctttatgaaaaaagaggagaagtctcctggaaatcatacgaagttttctctctcgtgtggaaactctcctttaaattctggcaagaatttcgaggagttgtggtatctctcttccgggttaggcggaggctcgctccgatctgatcaaacgtagaaacgatggtatcaatgtaggatctgttcggaatcacgtctccgagcacttttccacatgaccccggttatttgcggatgtaaccatttgcggattgagcgcgattacggttatgcatctgcggttatcggttgaccgtgaccgcggttgtttgaaaatgcgttttttcgcaaacactagtcattaattcttcgcaacccatgagaatgcccgttggtatagtgcatattcgcgctcccttccttcaacgtatcaaaaaccatccaatatcgaaattcatccgaaaccttcgaaagtagttgattttttccaccggataatagggatgcttcctctcgggaggatacagcatgatcggaagcaagccgctcacagctccgattcagagtgttaagactcggtccctgattcattctttctcatccgcgcgttacgatgccgatacccatcgcaaaactcacaagggaactatacaaagtgtaacacccagatttgaatgcgaaggtgcccattttgtagtccatggtgggtcatgttcaggcccacagttgatcgtcttgaatgggcccgtgttttttctagggaggtccgaagttccgaaaaaaagaggttctcctgctttccagctcggattgaccccctgttattgattggtgactcgagtttttgacccttaatttgtgactaatatggtggataagcattgagacggactaggcactcacttcttcccgctggatcgttcgcgaccgagcggcagcacgatatgacatgtccttgcggtcatgatcgttgattagctccgacgtcctgaggacgacggaagcaactcctagcaagagaaacgacgcaaaaaaaacaatcaattacgagcaaacatattctgtagcattgctctcccaagttttgttgatgacaccaagaaaaactttgcatatgtgagcggcatgggatgaaatgggctaaacacctgttgaagactatgcctcataggtcacccaagatattgctttccgctctgagtcaggcgaaacaagattcactcgatccctctgtgtgctacctagaccagtcactgatttaaagtcgaaaactgtagtcactaatcagaaataggggagtcaatgagccctggaaggccggaaaacgtattttttccgaatttcgggctccccgagaaaacaccacggatccattcgagacgatcaactgcgggcccgaacatggcccagcatagactaccgagcgggcaccctctaactcaaatccgggtttagacattcaccattccattccggtttccgtgacaaagtccgcaccacaactgagcgccatggaggaaacgttgctttgtaagaaatatgtcgggaggaaaacgaatcacagccaaagctgccttcagtcattccaagtatttcatacagcgcccgaagtctcggtcagtgaaattccagttcctcttgcgttgagattgtttcgtgggagatgtttccgcacggattccgcctctttgagtgttcgtcccgctcgcctcggcttcaaattagctccaatgtttgcggatgacaggctcacgacatagctagtcagttgggagtaatcggatgcgtcaagtcgcgtgctgtaaccgcaagacaatattccggtcggtcaactagctctccgacgcgatatcgactcgttttagttcctcagtcacagaatcgagggacggcacgttgacaacattggtcgctccagcccggaaaacgaacgaaaagtagccgtaaccaacattggaaagtctgatttcccgcgttggccggcgacggataacccggaagctttcatgcgacgagttgtcctgtcctctccaacggagcctcaaatagacttgtctacaccatgaaaggcagtgggccattgactgaaggccggtcggaaatgatccaatgtgagagttcaactttggaactagcccgaaaaatgacggaacaacgggaaccattctcaacttcagagattactcagaggaaatatggttagagttccactcacaatcagctccaattcaacccgacccgagccaggcatcgtctttgcacgcttcgaggtaatcttgggtcgggagttttttttttggagctaaatttatgactcagctcaaactgcacaacatcgctgtgcttcggttgacgggtttgaatcattgctaccaaacgttcccttcctgaagcgtggctctgaacagaggttggttttgaaacgggtgctgagtcaggaccacatactcgagaggaaccgcagtatggtcagttggggtgattccgattcctcgttcctgagattccatcctcatgggggcaggaacgtgtatcagctattaggttctccccgatttcgtctcgctggtcgatatctcactccgagccacagataggttgaattagggcggcgattttccttcccggaatctttacctcgctgattgctctgcaaaaggagtcggagtcgaggtctctgtggagagattttgattcctcattcgcagtggccggtataggattgtgtttcgtggagcggctcagaaattaccctcttctcttcggctcattccacttcttttaggatcgagttcatacccgcatgattcaatgcggagaacgatttcactgctgagaacgatgcagctgtccggtcgccttcaaattcggaagccttgagaatacacgatggaagaactctcgacctacattgaccactctgtatgctggaaagcgttttgacgtgaaaaattcccactagaaacgaagtatgcagttggacgataattcgttaatgatgacgtcaatcaaacgaaatccaatgacacttgtgaccgggccctgggcgagggctcagtgaagagtcatttcaatggacaactctgcgaattctcggaaggtcgccgcaattccgcggttgacacagtgtattcgtatactttggatgacatgaacgctccgtggcgaactcctgaattgactgaaaaattcgggtgcagaagaggctgacgaataaattatcggagcggtagagagccgaatgatcagagtcaacaggcctgtgcaggccggaactgaatttcgggaccgtcattcggaaaaggaggatcattgtgaaggttgtgacggggggtcaaacatcatggacatctggatccttcactgcggccggactgcgcgacgctcgagacattcgagaagccggacgaacatttgagaagtcttcgtagtgagcgtatcaaaaagtgttgagcacataatcgctctgtggtacgacgtcaactcactcgaactatgcttcttcacccgatatttctgggccccgtggcctcgcgctgtcatagaaagttgtttgcataacgaccaggagcagtttcaacgaatgagacggtaacttttcgtcaccaagtaggatcgtttcgagtcctccatggggatgttctgctgccatgggcatattcatgtcttcgcttgtgtcgcagatttccgcttcattggtccgtcgttggtccttccgtagcatgatcactgaagtctcgagaagccgtcaaaaccaactgattttgagttcgccatcttctagccgcacttatatttttctctgcatccatggccctgatcgatgaggatatcagctcttccgttgtcgctgagtgcatcctgaacggcccacactatagaaattaacgaaatcctctgagagtcagagccgatcgccgtagtcttgaactgccgatcgtttgcggggagctcgagcgcatacgtgatctcttcgaagaatatagcggtcatgcatgacatcggctctcgttgcgcggacgacaaacaagataactgcgagacgtcttccagaagctgcaaaactcgcttgaatctgggaaaatctgtccatcccacagaagatggagcgttgattcagaccagctttccaacgcgatcgccgtcgagatatcttccccgaaagtattccaagctgtcctcggtgtgagaccccaagaaccagcagtcgtaccacatcgccttgtctcaaggtcctgattttcattgcctcctcgcatcatcaacgacagtattgattgaggatcaggtgaatatgtgttgttatgagggttttggcacaaagttcgagaaactgagctcttcatgttcgaaatcggggagcctgcagcttacgcgggttgaagcgattttcgcagtcgcgccgcccctgcctcatttggctcatttgatcggtctccgaattagcagaagcggtgaaccagcgcggctggacaacgaaactccggtggacgtgtgcgcatccacttatcattcagtctcggataaaacagccaacctcaacggaatacgatcggaattgcgcggataatcctgatgcacgaaaaggaccccacagaagtcctcttccggaagagagagtaggctcttgtatcaccgatctgaggaaattttattcccgaataaatacagcaccggccgtcagagcactccggcagagcacttcgaggtaaattcatcgcgttataaatattcgttccaacaacgctcgcttaatgtcactgaactgcggcttgagaaatgacttcctgatttgcgaaatatgtcagagagctttatgagagaattgggtttgtcacctgaaagagcattcatccaagaatcttggtctacgggatgaactggctgcataaaaatcgcccgagtgcttccccccgttgttgcgtaatgtcgtacgatgcctctagagctaacatcttctgtaaagcctcgggacaagaactctccaacggacggggcttgtgagatctctgggttcggcaaataatttttaattctagtagaggcaaatcgcttccagagagctgttgagaagttctcacattcgttgcaagatctcatccccatcgcttctaaaggatataaatcgttgctgttattcttctacatttttgtgtgctctgatctgtatcggtcttagtgaggagctcctctacccttggagaaccacacttccttccatgaggaatttcgcgcgaaatgcactcctatttggtaacgttaaaatctgagttgtgtattggaagtaagccgtgaccaagtcaggcggccgtcctaggaacatcgtgctgctgagaaatccatccttcaaatcatgactcggttcggctcctgtcattcgcggttgcaaagtactgagcccgaactagtcagaaagcatatcacatgactcagaaaactatttgaaacggctaatgtgccagcagcataggacttcggctccaccagcattgttcgactctacctctgatgactcgcgtgaatttctcgtctggcactcatttcagatccgcagaatcacctacatgcacctacgtgcatttagcgcttcacatttcgacatcgcaagcaaatcaatttcccaggcaaactctccaggataatactgccagcaatcattacggtgaggaatgttccgtccggtacagtcgttccttccgatgatctctagtcgcttccaccaccagtgaaaggaaattatttgaaccctatgccaggtgacttcttattagcaaattcaagctaaatcatctagaaacctaaaaacattgaaaatgaattatcacgttcgataacgatgagctgtgtggaggagggatcctcgtcgtttcctgtcccgagaatgaagcacagttcttcaacgctcgaacgcttatataaccttcgacgaagagtcatatacaaaatactacatgttattcgggaaaattcgtaactcgtttcatcccaatcccggaaaaaagctaaccccactgcagaactttttggcaaaaccgttttggctgagttgaaatgcctttcttcgtcagaggaggttccatgcaaattctcggactccttgggatcgcacacgtggctcacatggtcggacctcccctttgacttcacatcaagcgaccgattcgatctattcatgtcacctctgggagctggaacttcttgattacactgcgagccgtttgtccaatcttccttgacagccaactcagactgcgtgaactggaattccccggagggtgatcctcgagaagttgtgttgaattgactttggttccctgagcagcggtctgagctggagcggtcgcgagcctcccgattccggtgtccatattcagtccgactcttgttcgaatcgatgtatcagagtgccgggcatcacgatcaatgccccgcggatgtgtcatatgagcggaatcataagggcgagcagagacagcgtcgcgacggtccaagtaacgggcaccacgagggaggctctgcatttcaaaacttgactcggatagtcactctcgtcgatggtgttgtccgagtcgtcttccggagaggcgccacattcgttcgatggacacattgcttcacaggctggacagattaagtgcgatgaatgcagccaaccctctctatccacgatgcgaacataaactttctggccttcgtaaaggcatcgcagagtggtgtttgtgcttagaatgatttccagaagtccgttgtcgcagcggtactgtaacgtttggaacggattataatgcttcatcgaggttgagcggtcgagatggggttttcgtgtgcaccaagacccgatcgacagcgagcatctccaacaattttttgatctcatccagcatactgttcggaggtctgatccacggccatggcgagaggatgaaggagcgatttcaaacgtacctgataacaagcggatccccagttctgccaatgtctcacggtggcacagttcgattccttccagcgatccgtgaggaaacagcgcgatctctcgccataggtttccagagcgaagtttttacccgagagaggttgatttgcggcgaaactgcattcgctgttacggcccgaattcgcccacgtgaactcctgaaataacgagcgtgggtgaatgagacttttacgcaaacggggaacgtcgtacactccacgtcatgagagagggcaataacgggaaaaaaaaaacttcttcccacagccagcgcgcattacctgtatgaaaggacaataatcagcgagggcaacggagctcccgaagctggccgcgtattcgccgccaataccgtcgatctgatcgaaaaaccggaaatcttccggaagcgggacaggatactggaccaaattgcaaagtgcgactgcgttccgcgtctcggtgcatgtagttcgtagcggattcctcttcacggtatcgcagtatgggaagatcgagttccccgtttccttgcgccatctcatccattcgaaacacgacatcgtggtgaaattgcagcccaggtcccggccccatagcaaatcgtcgtgaccgtcggtagaccagtaccatccgctgtcttccatcaaggcgaaagtcactcgggaatagacaggattctgcgtgtttgttccggtcatggcctcattctcaaagacgcgcttctcccagtgcgtcaggcgtgttccatcgtcgccctggtcctccagctcggctcctgcaacgaattcggatggattttggtactggttaaacatacatcagcgctggtcaaggttgcgtaggtgacctgaatgcacgcatacatgacatggttgacgacagtgattagaacggcgaaaaaatctgttgtagcatccctcaccgataagattggggcatccgaaatgagctctgacagcttcgaccacacggggagtcaccacgaaattgcgttttttcataaccatgcccgtcgtcgtcttccagggcaactcaacgctctgaacgatcctgtcattccatcgatgtaccattaaccttaggagagacgaattctggattattgctcgaaaaggaacgtgcatcgtccgagaagcgcttcataagcgagacctccatggatcccagtcacaggagcctcagggaatagctcgtggcagcagaagataaggatttcatcaaaacttgtggagcagaatcgcactggtgccgctaatgaagggccgcttcgtctgctcttgcctaaccactggaggggtgcctgcctcttattggcctgattttccaccgattcccatgagattccccctatcgccctgcttccgagccaaggccgccgattcatggctctccgatacagacgccgaactgtccaccttccgattatcgcaaagtaaattcaactgggagcgaggcggctcgatggttggatgacttgtcattagccgtaccggacgtaacccaaaggctgtgtattcgatgaatgcgattcggtggatcgcgagaatcgacgattggcgcttccgcgcatggcgttgagatcgggtgtgcaccgtccgcccggcggggcgaagcggggccagccctagctcgacttcctgtgtcccgttggacgatcctgagaactttgcacggaggtggaggaatgaatcgttgctcttcgggttttgtttgttcagaacggacccggagttacatcgattcccttccaccagaggctctgcgagcttcagcacgccttttcacattctccagatgagcgtgtctccgcttgcattcccggtatcatgagttcagagcttgtccctctcctttcctcaaattcaccaaatttcactgattcctttcttctccctattcggcggtttagctctgcccgggtacgacgactccccaggtggtaccatgtcattccgaccgacttcaggcgagctcagaactggacttactcttcgtcgatatccgggcgccccgtgatgtttgatcttttcgtgagggggctgccgtcgtcgtcgcgaaagaacgcgaacaggctcactgagaacccgagagcgtggagaacctggaagagaatatttccctcaaagtcggacacagccctcagatcctctcaagttagaagccagctcaagtcgttccaactccgagagaacgcgcggcgggacgaacttctatcccgttgggcgctgcttccgtcagctgtatcccagctaccgactgggagggaatctctcaacatctcgagcgtagccagctcttgcttcctgagacgcacgttttcgcgagactcgcaagaaaatggaccctccgttccctcgcaaggttcagtattggcgatcatggctcgatgagcggaactagatcagatgtcagggatcatccctctcgccaccagtcatccggctcggaaccgggcttcgatagtcttacctcgtgtttaactgtggatagcagcgtccgcacgtgttgttcttcgggcagaagcgtcgatggacacagatttgcatgtcccgctattggacggtcgaactgggcttcctgctggcagtggacggcgtatgcaattgtctcgccctgcaaacagaaagaggcgaccttatttaccctccgtcgacgaactccgacccccctgctttcatgtgttgaccgccatcgcggtggaagccatcgcaaaatgcctttttgagtcacagcgacgtccacgacctcgtgatctctttgatctatcttaccactgagacattctgcgtaaacgatagctgagttacgatgaccgttgagaattcgcggtaggatatgatgcttctcaatacgtacgcagcaaagagggaaagctttctatggaaacatctcgggattattgctactcatactcaggaaaatctctgttcgcagcggaacgcgcgaaggctcgagcttcaaaccccgcgaagaaacgtcaacatcgccgagacgcgtcttcccttccgatgaagagcgagaactcggcggcatgaattaagttcacaccgagtggaacgggcaccgcatcttctcgctatctgtatggtcgtgactcacacaaatatcggatctactgcatggaaacgataccgagctcattgaccgaatttattaaagtggtatgccagcgcggttggagaaggcatgaaatttgaccatcctcctgacgcagtcgacatggcattttctcagtgccctgtcaggctcccgcaagaaactgcagtgtttctcaaccgttgttgagtcctcactagaccttgagccttttttaagaataaaaaataaatcggaagcgacaggttagagcttgaaggttaggtgtcggatcctccgttcaagacaaagtcgcttggcgttgggaaacgggacctgcaatcgggctccataccacgccgagcgtttggtcgtcccgctggttcaactcgtgcggaagctggaacagccagttccgcacaggagcatgagccaacgaaagatctgatctgggaggggacgggagtttcggtggagaattggattttcggtggtgattgatgggataatttcgagaaatcaactgaatttccaggctcgaatcattagtggcaagtcgtggttcactgagtacgattagccgatcgaggcttcgaagaagagacctttcatcctctgcccgatttcagtgccgcccagatcgaagtcaggagggagcggcggatgggcgaacagctgttagaatgaacagcgtgctcgttgcacgaataactgacctgggtacatttttcgccctctatggcggacacgtatagcacgaaatcggcgtctgcaactccgccctcctggccgaactcttcctcgtgggtgtgacagtcgtgtccataagcgtcgcaagttctgcacggctgtaaaacaaaactctcatttcattcgaggaatgtccaacgacaatggagactgagaggagtagttttcacgcagcttgtctggagagcagagagaaatgcatgcgcgaattctagccaggagtttctgtgactaacgacggaactcaacaatagggacggctccgccgtgaccatcggctggcttccattgaaaagctcatcatgaagtgcagactgaagaacgatgggggagcccgtatcgggagcttttccagccggaatagtggctcgtaatcgctcttgttccccgacaagttctcgggccggagacgtgtcgatgacgcctgattcaatgaagctcgccgtcggttccttcgcttccctcgttcgatgcattcgatttccctgcagcagggctaatttccgtggatcgaataagcatcggggacgcgggagcaatcaggaaaatgggaacgttcagcttctcaagtgtaagctccacggacatcccgaatccggcacgaatacgcagttgctcaagacctgttcgcaatcgagtcggagcggccttgcgcccacctcgcgtgtgcaggaatcgagaaccaagccctgcaggaactggcgcaggtccgatgatgcctctgaatttccggttcgactaagcactcggaagcaaagatgccggcggctcatgatattcgaaaattttcgcatcttttttcaattttttgggcaatcatgattgactgctgccgtgctccaaaacggatgacgtcaaactgattctgcctcccccgaagatcggagcgcacctcagacggagccatcacgggtgggccacgcgtcgaacagtgccacggggttcgatattttcgaacttctgggcatcgtgttcagctcgcattcgtagaatgacgaacgagccgatggcccgcgatcgtcgctccggaagcatcttcgagcgatcatcagatctagtctgaatttctgtctcttctgcctgaatctgattgcatcgcgctgttgagccgtgcgaaacgccatcatggatgacgaagctcgagatggagtatgccttgcgtcccaaaatttagatctcgagctgcgggaaagcgtcgcgttgaaatcacaaatgttacacaagttcactgtcagtccccgttgggatcgaaccgacattggaatcagagtcgaggaaacgcacttctcctgaaacactgggagtatataaatgttgcactcaccgcaagatgttctcgaggcacgggaacctctccacagagactgacgtcctcgcatctatctcgacagtattgattctgttcgccggccaggaagaaaaccttgtcttcgggacatcgcctgtaaaatttcatggtcaatcgaactttccgttctttctgtaatttttcctaaagttcagaagttcataatcactcgatgagaggtttcatcggaacgcgatgtccgaacatttctgcgaggtcgagcttctcatggaatatttcgccacaaatggcccccgttatcgggtttacacaatttagcgaacgcggctgcaaaaaattctcagttcgagcactgctgtaaaaactcgtaaccacgaacgcgcttagaatgagaaattacttccatggtaacgaaacgccctctgagcgacgtggatcaaatgttttccgccgctgatatccggagagaaattctagaaatttttccgggatgaatattgcccgattctgttccatgcccaacagatttgtggaatctgggagcgaatgcgggtgccgtacatgcgttccgtccggactttcggagtttgcaactagatccgataaacgccgtcattttcgatccctgcccaggcccctcagctgctcgctttccctcgctgtcggttctccgatcggtttccgtccacgcaacttcgtctcctgagcggggcagaattgtgatttattcatcgaaattcctcctccgcggagaacggttacagatttgcgtgaaatattcagatggatatttgtgcggctctctgcacacatctcatgttgtaatacgcagctcgagaattgacgcagactgccgcgattcaaaaacggcgttgcagtgttggcttgaagtaaggccctatggatcattcgtttcggctacgagagtcgagctcttgagggaactccgtccggaatgctttaccgcctgcgggttttgtttcccgccgtttccggatcggctgggaaacggagttccggatgtcgaccaagatattttcatccgagcgatgcactgtcgtttcggaagttcaaaacaactttgttgcgccatcgatacccgacaaggcctcttcgcgacccaaggtcgaaaatccgcaacgacatccgttgcctgagcttacatcggcacacttcttgatcctgcccaggttggcttccttagattcttgcaacaaacgaccacgatggcgacacgggacgggaaattcgggatctcgagctcggcatcgttcctgatgcgtggagtcgaccattcgggggcagttgttcttctgcctacgtgcagacccatcgtgaatctcacgccccgaggatatgtccaaagtccgcctgttcccgacgcgggtttggaggagggctcacctgttaagtttgatcggtgtgttcagtgggtatcgagggcgaaggttctgctgccagtattcgacagccgcggggaggatacttttatcgatgagatcgaattgttccggactcagcctggaaaaagtgatttgagaaaaatattcaagtgtccgacttgtgggacggagatcaacagtcggaccaaaatccgacgattaacgaagctcagctcagctcacgcattcccgacgggagcatggagcgccattcccgacaaactggggaacgaacatcgctcggatccaacgcccctcgagattccaagagcagcattctccgagaaaatttgcaacgttttacacgccgagaactctgagccgtttgccgtccctggctcagatttccgcggatctcaccacgtgtcgagcactggcatatttgcatttttctctctgcatgtgagggctcagtcggaagctcgaataagaagacttaggacgcggattggagaacctatgttctccgcaggcagcttctccaacgcggtacagtcgcttcgcttcggtccaacgatgtgtgtgtgtgatgaaggatggagctgatgcgcgagctgccgtcttcaactgcggatggcaaatcgcagcccctgcatggaggattctgcagctcttgccagccgaggaaaatcgcgggttgcttccaagttcgtgagctccgctgcacctgactggtacttcattcgtaatcagagattacgagcacatgagaaacgagcggcgctccgaatccggggcctgatgttctcccgagctggggatttgagtttgtgtgttttcctcagatcccatgcgaggctctcacctcacacttgttccggacacggaagacgctcgaaacggactctacgaaaatagtctctgaagaatggaaatttccttactgactgatgctctcgttgtggtagaagtaacgtattcgcagcggagaggcttcctggcgccggacgcgacgcggcttcgcctcaccgagatgtatcggagggagtacgtcatcgaaggttggcctcgtataggagcaaagaccggcctgtcccggtgtgagggacttgactgagagtgcagttgagaagttcaacaagcaagctgcccaaaacgttgagaagccgatgatcacaagggtcatcctgaaacgaataacggtcaggaccacgagtttcataattgtccgagacaggaagggccggacttcgaaacgagttatcagcgggagaggaaaaggagcaattcgagctgctcctcagattgcacgcggcgtgaggacacaggactcctaggactgtacgacgctctgttgaagacagcattcacagcattggagaagcttctgatctcaggtctacaactggctccggaaattcagccttcaacctcagagaaatgtcccacagacggctgaacttgttacttgtgggctcactgcgagaaaaagtggcgagatgatggatctaggtattgaagttcccaacgtcggccttgtgagtgtcgtcattagtacgtgattggctacgggctcgtcgagacagttggaggagggggattatcgttgacgagtgtgtcaggaggccccgagatccgcaatagttatcgcaggtaacgggatatgaaaattgtcgacgacagccactggccgtcgatgaatttcgagaacacggcctgaatcgtcactcgatgagccccgacaaggttagcaagactctttgcagtagagcattccaattttgaaaggtgagacgatcgcgaaatactgagctcagcgataccgaatctgaccaggatgctgatcgacgaacgacctcccgggaaccggatcttgacaccgcggcgtcctggggggctgtagggaaagaaaccgattgcgtgagcgcagtcattcaactcctccgaaatacgaatgcagcctctttcgaagagcatcgtcccacctcgaatcagcctgcaacctttcccggtcagaactcattctggatgagcgacggtgccacaggagaagtatccctctatctctgggaaagttggaatgcatcgttgagattggattccatgcctcgaactcatctatctccaatatttcgttgcaaagcgctgcacgatcatgccgcatcctacatatatgatccgggtattactcattgatggataggcttcctacgaggaatggatttcagtttcgagatgattccggaggtttcccactcataaattttcctcgctcccaagcaatagccatccatacccaaccaggcctccggagactggctcaagctgttccactcagcaaggcggaacacattggaatcgagcgagctcccagaaactctttccctgtattcggagagagggtttcctctcggagttctcaactcccgaaagctcgctccctcctcggagacgataattcggtccgccagtcagtcactctgacagctcaaagcatgttcttctcgacgggtcgtcggagaggagaaaaaggccatgggggctgagatttgtgcccgcgtggaagtaagaccatggctcgatccgccggtcggtcaagatttccagcctctcgttttgtcggtgacagccacaagtgaacggaacaccggatgattttccacagccggagtcagttaccgacggagctcctccaagttctccgtcggctccgcttccggagcagcgattatcgtggtagtccatctccacgcgaggccagaaacactccattggggaacgcagttgctttcggtcagagagaacttcccaacggcttccgatttgccgtatctttctcaccgcggcggccgagcgctatggaaattcgacaggatccagaacgaccttcagacttctggtgaatgaccgtgcagtgactcttcgaagccctcatatcggttgctcacccgtcagctctcctcgttgcctacgcgccagtcgcgatcgatcgttgatatccggcggacgttttcgagtgaaactctagaaaagacactggatcatggagtggagccagcggccacgatctgttcacgggcctccgaccccgttccggataggatcaggagctgaattgagattcgttgctgattctaacaacctctgtgagtttcagaaatggactaatcccatccgagcccgagcggcgacatccttcgggacggggatgccttttgtgaattccgcgacacacatctactggttggtgggcagctgctcactcgagaattcagtggcgtcgattattttcggggaagcgtccccgggctttccagctaacgagaataatggggagtggacagcatgagcgaacattacaagaacatcacgtctcggagtcgttcgtgaagcatgtccagggagtcggattaaaacgaggccgttgaacaatgatcaacattcgccaatattcccgactacccagaagccaccgacagtaggtacaacaaacattcgcatgtggaaagtgcaacgaaccgtttcagggtgatccggctcttctcagctagccgcaaaaatctcgacgatggcaggcttgtgaataattggagttcgctgcgctaggcttggactggctagttccataggcggaaatctctgattattcgacttcgttcttggaaagtttacagccatccgagcagcggtcgaggacaagaacgtgctcctttgaatgcggtcagccgagggttgtgacgtaattctcagtcgtaccatctgtccgatccggagtctccggacgacggggcgtcaggcggacacgtgtcccccgcacgagttccagctcttatcaaacgtccgattctcgatatcgaaatcagagacctcgatcagatggtttcccgcacgcagcatgcttcagatcagtcatctcgattctggattgctccctgccagaggtttcggctatgctggaagccccaggaacactctcgaaggtaaacaacgtttgtttgccatcagaattatgtcataaattcggtttgaaccggaaaaataatccttcgctgttgaagatgtttgcccgggcccgttcggcacttagcgagaacagagcggtctcttagaagtgcgctccgttcatgagcctcgggtttaatgtagtgagattgcttcgcctctgtcatccgcgataatccccctctctccctttcctctgagctttttctcgtatgtcaaacagttttcaacgggcttcttggaggggttcggcgagccttgtctgacgaaacgtcggctcgctgaagccttccaagggcactgcacggacgactacggaaagcaaccggacccgagttcattttggtcgggatctcgagtcctccggagcgcggagagagctctggaagaggacagggaggggaaaacggtaacagcacgccggatgagtagtgcggaatcatgtgacttctcgagttcgaatcgaacacagtctcgctcgaagcttcccgccctggactgggagtcagagtggtgtcggccggtgcaacaggaaatgagtcgcaggacactggcacaacaaccaacacacgaactcgtatcatccgcttagcgggttccgtaacggaactcatgccggtcgggcccgtgaacgagacccgacccgctgcgctgtctgcgggccgagcgcttgaacgaaattgatattcgactcacgtaaattccactacgactcgggagatcccgtcttgtcgcgacaataatatgccccgatgaaatctgggagggacgaatcgattgaccccacttccatcggaggatctatgggtgatgcgcctagatgtactttattagagtacttatcgagccgtcccttcgactttgcccaatgattgactgaacccacgtaccagaaccagcccgatgatgactcggagttcaacaaccagagtcaaaggtgggcctcagttctagcgaccgagtcttcggtaaacaaagccggctaggcagctcagatcaggaaaggaacctcggaacgttgaatctgaattcattgagccacgctttttcgtttcgagctaaagcgagcgatcgtgacgctagtttgatctgggcatcgagggcaccgatttgggtggaacaagcacaaaaccctacgcttccgattccttccgaactggaaatgcgtatgcgggtatcttccgacaactcgagggacgtcgtgccgtggtacgcctttccagttctcttggcagggagtcgttcccgttggttcatacccgatgtgccgaaacccattgcaacgaaaacccgaagggccgaaaagaaagcgcgttgcaacgaaaaccctctctctcgttttgagggtcaagcggatccagctaagcttctatgcacagcacagggtctgagagactgcacttggatgggaaagaagagaccacgtaaatcatgctaagcttgggaactgcacacccaaaacgatgcccgacttgatcgcgactcgagctgttcaggttactgatcaatgacataccgggtatgtgaagggagtcacttacgtcgacgaacttcccatcattggagttttcgcgaagcgccagcagggtcgacctcagtggagatcctttgcttggataccctgactttagaatcacacgagggcagtctctcagagccgtgcatagaagctaagctcgatttgctctaccatcgaaacgagaggaagggttttacacctttttctgttactgattggctagtcgaacggcctgttcggagtgctcccgacgagcacgaaccggactgaattccctgcaaacccaagtaacgatcatgggatccaaaatctcgacgtgatacccgacctcggctgggccatagcgatatttgtttcaatcattcatcgcgaacttgagctcagcatcagtggctttgctagcatccgcgaggagaccatcatcgcaaatcgtaaacacgtcatccatgcaaatggctgcgcatcgcacgttccggcgcattcgaaccgagaccgtgtacgattccacaggttatcatcgccttcccgatttccgaacagaaccaccaattacggccgtagtaatcacggcgctcagtaccaacctggtggcggaaacagcttctccatgtgagattccccatgattctgatcgctcgtagaaacctggtgagagcaccaccgctgtatgcttagcctctccaggatcacagggaaggctacggattacctggaatccgtcggaggttttcatccggaattcgatcgaagcggggtcgaagttctctgggcagacattagaataccgcttgaggttcacgacgaatgaacaacgacttcgatccgagagcgtcaagaaattcaatggtataggtttccggataatctagattcctcatcgttctttaatggcaaggcaacgaggcttgggcttaaaacctcctgcgatttgccccgatcgactcagtttcaccgacggagcagagcgtgctgatccatccattcgattcgttttcacgtactcgatcccagaacttaggtgattagattcgagttgttgaacgcacgtcacggatttctcgatcttcgaacgagcgttcaagttcgctttcggtgtgtcatagatctatccgctcgatgtccacgataaacgcgacgatgaccaatgaagggactgagattcacctggccggccggcgggcggtacagatgacctcccgcacgccactcccgaacaaattagtgagactgcgaatatttgcgccggctccgactcggtttcctgggttgacttacgccagcaacgcatgaccaatccgaagccaggtcgtcgagcacgacctcgaggaacgcgaggatcccgtggccgaaactctctttctcgagggagaaaactgttctccaagatcagaacagactaccgagaaggaagcgagggcacgaatcaacggagcaatcgggggagtcggagcgatctgatttgagtgccgcccgcgcgcgaaatggagaaaaatctgagacgacaacggaaattggcatcgacttttcacagcagcttcctctctcaatacgggcacagagtcggcgggaggaacgatgttgccaagaaaacaaccacgaccgcacattccgaagagacttcatcaggaattgtccatgttcgcaggtgacgaaatatcccagaacaaagctctccttgttctgctcctcattctgtccgggtccagcaggaccgaagaagatctagatctagcaattcaacccgatgtcgtcgcgagctcagctcgatcatcggtatcgcgagcaccgctttcggagaacaaattcgatcaacgttacgaaaccttttctccgtccattgttcgagtgagtttttgcttcggaatcgttcacgagccaaccgaagaccaatcgctcagcattgaaccagactgatctggtctctctttagccccgaacaatgaacgtatcattttcgggtactctcgacttgcaaaggaccgttcgtggtacaaatagcgaggtagaaaactcaatatcgaagcatcgaagcgcattgatcgaacagcgtaacgatccaccctcactagcgtcgatgatcgccgctgatgtccgaggagttgaaacattctcgggagaggagtcactgacctccacgccgcagatcctgcacgcagcctctcaaagtaatggacaagccaacctagtggttgaccggagcggaggatcgcgtggcagacggccctttatgtcccggcggtgtgagtctctcagaacgtcacggaccacccaccggatattcgattggcagactcaactttcggctccttgcccgctgaaagttcatctggcgttgcctaaattcagcgtctctgctccatcaggagctgagtcggaatcgtggaatcggaagacgcgtgacggattgattgccgtgaagtgaaagctcgtaaaatcagggataaccgatatcgctgtaccgccgttcacacgatcgtagtcatggcagccagcggttaccgttggcgtcgtcaccagcccagcgcgtaataacaaacacacaagtcactcgttcctttgccgttgattgagacaacagcccaagcaacccgctagccaatcgagatgctccacgagcagagctttaccactgcctcttgaaacgccattagaactgtattatctgtttcatcgttccaattaacaacaccgagggaaaacatggtcggctcaaaaatttttcagcaacccgcagagctgcccgcgcggctcagggcaaaaactttcatcaaacgacggcttcacgctacagcaggtgccctgaaacagcgaaaagaggaagagcaagggatgcgcgaatgaatgatgacactcgaaaaggtaatagagaccgactctagcggcgtttactcgcgctctcagcgccgatcttcttgcctttccgatctctagtttcaatggccccgcggaacggataaggcgcgggatgacggcccagacgacgcggtccaggtacggccgaacgtctctgcatagcacacaccgaacgagacgaatgtcgacgaccgaagcttccaccaacaacactcccgtgaaccggtcatcgagacggataaccgttagagctcgaattagttctctctcccctccacagatcgttccgccatggctggttagcgcgaataccacctgaaccattctctgtaggagctcaggaaagccccgcactcgacgggtaaggacgcgcggatggacacaggaatggattccaggttctacgggtgttgaccgagcggcatctctgggctttctccatgcttctcccgcgaaacgcacagctgttgcggagtcactatttttcagccgaaaagtttcattcgaagtatgtcgttgtgtagctccacaaacaatgagctacaggtcggtgatcgattccatttcctgctgccagctgaactcccgattgcttccgagttcattctgtggatcctagtgcgaaagtgagctgcttgccggaagcctgttcgagcgaccgggaaaatattccgctaaaaagctttccaggtttgagtgagagaatcaaaagtatgattatggaccgcggaaagtcattatccgagttgagagcaacttctgtgcgtttcgactcgagccgcttgaaatggggctcgacagaattgaagattcgaatgagcttttattctcggagcagatcaggctcgaacgccatcaggcccagtgactctctctcccacgctcggtcggacagctcccacagaaaacgtcggcagaacaagtgaaaatccccgactttgatttttaagagctgttttacattctcgtttctcactcttccgttcccacggtgagcgcttcgcgttctgtgttccccggctgcgtcttctgtttcagctgctcttgcagaagggtgctttcgacaagtttcctcttctgtgcttgggtagcagaagcgttcctgggacaagaatatctgaagcagcgagtttatttttctgtgtcaagtttcccttttcctagcattcttagatcggaagctatgggagaagcgtgttccatcaaatctgtctttctcagggtgttgtgttcggaggcgttgctcatcgtcagcgccccgaactcgtcgacgcatcattcacagcggagtgaagtgagcgaagcactcatcgatttctgggcccgatgtcgatgagaaaagctagacagcatcatgttaaaaccagatacgagtcgcaacacaagaaccagacggcagacgcacaacatgaggcggaggtttgagactgagcagcagccatgtcccgcttgcctcacacaactctgaagaatgtgagcaagttcacgggaacagcttgcacaaacattccggaaactccatcggcactgtgatgcctcggaagtcgcgcgttatcaagcaaaaagaatcgtcaggagtccgtcggagagcttggcagcgatgaagcgttccatggggaggatcaaaactccgtaaaatactccgaacattggcgaaataatcatcatcgtatcactgagaacctatgtctcaagttgacgtaacaactctcggcggttcgatgtagctcggagatagaaaggaacaaagagacctaatggagccacccgcacgtgcaaggttatgaagacctcccaatcctatcctgatcgcagcaccaggacgtagtgcgaacgggcgaagccatacacccctccggaactcctgagccggagacgtgttcccgtcgcgggatcctgctcgaccatgaccttccgagaaaaccgtgatgcctacgcgtgatccctagttttcttctcgaaaccgaacaggaaacttctcaaccgttttttttcaactccagcgatgtgttgcataagagacgcaaggcaagaaaagaggagcgactggctcgcccgcagtaacatcgcacggtaacgtcggttctcattgtgagcagtcccgcaactccggtgtcaccgaaaatcgaagcccgggaccttcattgtcgattccattgcagatcctgacaactccgccctcgcggcatgttccagggtgggcttgggcgagattcgaatggatttgatcctccatggggagcggatcaggttcctaaacttggggatcgcctcgacggttgttccgttgaactcggagcccaccggttctacattcgctaagatatctctcttgataaacactccagatcacggattcgatttgatctcaggcaaagaattcgcgaatgctccgacgattactcccgttctctctcccatcgcgtgggctgattcgcgagactcgaaaacccgatactccgccgctctgtgtgcccaaaaacgactcgtcctctggtactctccgattctcctcgggaagtggatcttagccttgattgtgactggaacctggctgtttcacgtcgtctccacattctcctctcacatcgtcctttatgatccccacgcggtgtctggattccagctcaaagagcttttcaacagaaatattgaataacgcgcgacctccaaactaccgggcgcggcaccggtacacactcatttcaatcatcaactacaaacgaacatctgaagatcgctgtccccggggactaatatgcgacgtgggctccaactctgagagccccattcatctgactacatagttacatgtatgcgaagatcgagccactcagaagatcgattcccgtcccagtctcgaaggtttcttccccggagacggtgcgaaaatcctcccccgatgtaaattatgccgctatatacggagaaaacgtgatccatcgctccctcgtagactccacggctgggacgagctttgccccgtgttcatctcgtgggctcttgtttgcagccatcaaaagcagcgcaagctgacgctcgggtgccgcttggagcttccggcgaaacaacttgtcggaatcacttctagctgttttgtctgagtgcttgaatttctcgaaacattcggaaatcaggtctccgtgggcaccgctgaacttcgcgtcgacgattgaaccttccacacgatttcgatcacctttgagaggcaaatcgagaagcccgtgacggatctttcgcggaacagtcgtggtcggagagcgagtttcaacaagtcctcgacgcccaacaccagaacagagtttaaaccggtgcaaagcaagagaaccaaagagaactgaccgagaatgtcagtcaagcctcgtgcgcctctctggaaagtaatatcgcggcatcggttctcatctggaattcttagcgaaagtcacatcggtttcgtgttccagctcctacaattgcggcttggagcggaaaggagaggctcgtgaggatataggatctcagagaaccgctccaggcgatctgcactcgtattccggggagggtcttcatgggttccgttctcgccagacaatcgccgcgagaatctctcggacctctgaaccgagcgtatgaccgagctaacgctgcgtatcgaagttccttctggtccaaaatatacatgtggatgatggcgtgacagtgacaggaggttttgccgaaattcatcacaagctaggtcagatcgttttttttttctcgaaccgacggcttttgttgagtccgcgtggttcccccctgcgtcatcagagaaaatagagtcgggtttgccttctaccctttcgtcttatacatggtgttcgcctcccccgattgaaaaccagcaatcttgaacaggagcgactgacaacaaagatcggacgcagagaatcagacacgcgaagaacctacaatttcccccgatttctgccagatgctgctcacacagaaaccgccatcgttgttggcatcatccttgtaatcgtcattcatgagggccgtcagccttgtccgcgtgtgggaagaatgtaagaaaccatcagaataaaaaggagacatagagccctcacagcaacgatcgagccgagggaaggatccaacgagacagcttgtattttggaaagcgagttcccaatcaatcagatgcaattcagggaagctcgagtggcgcgttctgttctcgtccgccgtcattaccggaaatttctcggcgcgccttgcaatgacactcctctagcccacaatagtcaatgaaattcgaagtcggagaaaaatcatgcgcactggaactgcttattcggaaccacagagacgtttgcgatccgtcggttctcctcatcgactctgaacaaggttttgtcggatgaaccggattgcgaaagtcatactcccgagcaaaaaatgtctcagcgttccgaagtcgtctcgggtttctccagtctcttgacaaagcctcttcttctctttttcttcaacaacgggagaccgaatgcattctcttcaaagacaatatctgattggtgtaggaagctgacgtgcgaacgtcctcctcgaaatgaatcgacacaaaatccagaaaagtgaattcccccgatttcttcccctcaatgggatccgttcttgaaccggagatgacttacgttcccgatcagcgtttcgggcagatcatcgatgagccaaggaagtcccagtgaaaccgagtagatcgatcacgcactccacaagttcacgcttctcccgattccatagagtatctcctgagttgtagaagcctttcaacacggagaatcgctcttctgttcagctgagactgccggccaaccacaaccgggggcttcgcttccgctgttctgcctcgcacggccaacagagcaacagaatgtttgaacgcgcccttctgaaggcggaaatctctttccactttcagaacgtccctctccgaaagttttgaaagttgggcttattctctcccgcacatcaatcaaagcaaaggcggttgacgctcagtggctccggcatagacaaatcatcggctcacgaggttctcggagaacactacgttttcgcaccaagctttgacgttgggacagagacacttgtggttggtcaggccggcagacggtcgaatcgtcccgagtactggacgtcggcaagaaagtccattcgtcacaggaacacctaaaacgttcgtcacgcgacactctgcatgataagttgccgcagatctgtcacggacttggcggcaatggctcgctttttcggctgatgcgcgaccacacacacggccgacgagtgacagccgctccgctttcaggaggaagctcccgccccgggaaccgactgggttctgagtaaacaggctccaagtgtggcctctctccattgaaccctctcccgagtcgatttctctctcatttcaacatagggcttttaaggattggggctgtggacatcgctcgcgttcaaaccctctaaaagcagatctggtttgttgtcgatgtcaggagattcgatcctctgtggatttgaaggaaagtcgtctgaagtagacactccaattcggagacattcgtcctctcaacgctgattcgtcttgattgttcctgaagggagacaggctcgatcttcggcgattggtctgacttgtgtcgctcaccttctgcggtttcgtgtgcgtaacgagttgtggtaaggagcccaggcgtgactcagtggaatgctgctcggcgcagacgacggaagcgtcgcccttatataacacgcgacttgtgaaagagctccgatcaggcaccactgacgaacgaaggttcttagcttgacctaggacgaccctaaatggttcgtgactgggcagctacgagaatttgaatacgcacaatttgttcatctgaaatcacatcatccccgcagaggtctggctccgagaggagggagcatcgagaaactcgccgcagccggagtcccaggaaggatgttcacgatcagactcctcatcgagatctttcaacgaggcgaagctgtgattgaagacgatgtaggagagctccgaccttcccttcctaccaccgagcaatgagcttagttggggctccgttgcagagtaaacgatatattttatagactggtgactttgttaccgagttccaaactaaacgccaccggactgagaaataatctgagcattatgccctctcgactcacaccgtcgatatttagtgaataagatgcatttcttaagatgggttctcgcctcatcgaaacttttgaaggaaattatcggcgtcgccgcattccgagatcgctcaacaccctctgccgtcgaacttcacatgttctcgagttccggactgaactacccggaaacgtggagaggaacctttcagatagatgtagctggccggtgcagacagggacgcctcgccatcatttacggagcaataaatattacgaacggctcgcctccactgtaaaaagcttccttgagccgcggcggacgctaaacaaactaattctccccgcaccgtgttcggtcgctttattcgggcccaaggagagacctctacacgttatttctttcttcgtagatcagtatcgagagcttgagagccgatagcgagctccaaaaataacagcctgagccagtgatcaaactctcgtatgggaggaagcctttgtttatatcctgcttcgtgaggaattcctcatttacgaatgtcgcattctgcgcgacaatctcacgaggaacaggtgaccttcaacggagaggtcgctcttgtttgagatcaccattcacgctcgtggactgtgggcttcaggccgctgagctgctcgggcaagatgagctcttttgtcgggcgttaatttcaattccgctcggagtctatcgatgatcagcgacgagtttcagacacaccgtagcggagtttgggaatgtttacgctgtcaggacggggaacgaacagcaggtccaccgcttgagtaatgaatttcattcaaatgatgggatgttctgtcttcgctgaggcttatccagtgctttcagaagtctgagatgtttatgtgaccgaaagacgtgcgttcaccaaattgagctctatccgtcgagcgcacaatgtcgggaacgggtcagttgaaagaatggccgctacgaggggtcgtgttttgatgaaaaacctcagactcgagttatgattgctatcacaagcctgttgagcttccctgaagagaatccggagagagagaatgatgtctaagaggcaagcaaggcaatcaggctcagagctaacaagaaaaaggtcaattgtgtcatgaatcaagttgattgttcactctcgtccggccatcagcgtttcagagcgtctcaccggaacggaagctctgggaaaacgatctcatctttcgggaggattccgctttccatgactgcgagaacgaagaccgagacttcccgctcacagctgactgcaggaagtggcgagcggcatagtaacagattgagccttagattcccagatatttcctagcaggatggtggccggcataaattgccagtgtcataaccaaattttctttgagctagtttgattgagccaaaggcctgtggccggatccatcggaacggagtttgatagtccaacgttcttccaagccgcggtaaaactcttggatggctccgagtgagttgattcagcgatcgttcgaacatcctctgtgcccctagctgtgtgtgtgcgaaggctctctgtgcccctcccaagatgttgaaatattcggtgcggccggtgcaatcgatgagggacaagcaatggctcgatcatcaatgcgttctcttcggctggagccacctcacaagtgcggttgtccgttctccttcccggaaacatgagagctgcctacagtaggaaaagtcgccgatgaaacttgtcaagtgacttctcggcaaagcagagcgtatacatagcgccgccgggggcgcttcgggtggaagctctccatcggcattggactgactccaacgtgtgttgccctgtatcagtgtccccaaccactactgcagcgcgacctgctctctgcgaaaaattctcccgccctcatctctcgggagcatcggaggaatcgtttcgctcacacataatacgcgtttcatcacagtacgattcaagtcaccagccgttgccgacttttggaatgagcggtgaagttgagcttcagatgaggggtttgggaagccaaacttccgtcttttccgatccgtcatggatctcagaatcagagcgcagcagtgaaaacaaagtcacgtccttgcctcatatcactctctcatatatggaacacaagcagtggacaggaagtaacaggaacaacggcctagcatcaattgctccgtctctcgatacgagccgagaactcctcgccgtggaaatggatttcggtgatgacgacagtggtcagccggagccaggatgggcgacgttatgagatgtcgtagagtcagagcgagccttgggcggaaatttcaagctgcttataagcagcttgaaattatcattgcctccgaattccgcgaacagagccgtgagtgagcccgatgggaacccctctgatatgagagaccctgctgttgcaaccgaatgattatcgatcgattgatcctgggtaggttttgaggagcgaactccggtcgagagagggatctcaacgcatgatgaacacgggcagcacatacagtttggagctgggaaacttcacgagctgagtgcaaatcaagggaaccagcacaagtaccccgatcgtactgagttgaacctaggatttgcggaagcccgcattttcagaatcggaaactcgcggtctgtaatttttgagggtaaccgcaatagaaagcccgcgaacggaaactgtgagctgaagcctggctgtctcaagcccgcggttccaaaaactgcgggcttgcgggcttgcgggctttgttgcgggctcaatgcagctcgcctccggaatcttcactatcactaatagttggcggagtttgataataggaatctgaatagtgatggaaatgatagggtatcctcaggcttttgccgttgagggccgcgggtttacgcccgcggccctagcgcgctagttgcggtcgcgcgcaggcttgcggtcctgaaaatgcgggctcccgcaaaccctagttgaataccaactttccgcagatagacaggcgctagattctcaacagcgaatcgcgatcatcgtcacaaatcggaaaacggagcggagatcgctactttttcccagatttctgggtgctgtcgtgaggtgtcatgatatcgaggtaaatatcccgtaaggattcgattcgtcatcagccgcgattcaggtatatcagctgagtatcctccacactggacacatccagagagcgagccatccagaagcgggagagggatcatgagcgatcgttccttcccgcttctcaaagtccgtgttcttagccctggcaagttccagcagggacagaagcttggggggcctcgaacctgagactcgttgatcacacggatcattgtatccaatctcgacttctcttctcgtcctgatcaccaaacctgaatcaaaagcattgatggaagttccgtctcttggggaatcgtcagtcaactgcgtgcatccacccccacctgggctctcctcgatgtgctttgagcctcactctgtgattttgtgtcccgtagcatgcgagaacagtatgtacagggtggtcaacgtaagtcgggaattttctcactcttcttttggtcataatatggtccgattctggaaagcgtgttctgattgatagcggacgaaacgacgcatcttttccagcttgcgtcaatcggtggagaactcacttttctggaaagccgctagagatgacaattttttttccaagtcttcccaaaaactgtccttgaaacgtctcaagtaagccgatccagttggtcatcgtttattcggatgcagcgaaggatgtccctaatccactgatgaactggcgagaaagggcgaccgatcgcatcagcatcacaagaatctctcatctgttgacggaacgttgcctcggttcaatcgccccgtatcccctcatggaagccaaattcggaaaatttatcgatggcgaaaagttcttagatgggtccaaacggtccgaccatagaaatgccgggtcgacccgaccactttttcctcggtcataaattcagctcttccagtttgtggtcctggaaaggaaacctgggtgagctcgattttcggacgaaagaaaaagttttcagatcgacccggcaactccattgtcggtaagtttgggttattctaaaaaaatttcgccaccggaaagctttcccaattcggctttcccgaggagatacgggagacattgcatcgaggacgatatttcgtcaacaggtgagtgatcttttcgatgctgatgcggtcggtcgccctttctcgtgctttcgaccgattctcgccaactggatcggttcgtttatgacgtttcacgcgcagttttttgaaaaagtttgagaaaaaatcaggcaggtagcctcccttgggctggcaaggctatagccnnnnnnnnnnnnnnnnnnnnnnnnnnnnnnnnnnnnnnnnnnnnnnnnnnnnnnnnnnnnnnnnnatattgactctcggggagcttcgacacgctctcagattgcagagaagttacgaaatactacgcatgtggatatagtatcggagagcttccgagatttcacatcgaaggcaagctcctcttgttgttggcaaggcgattctaccgttctcataagacttcataaatgaatagattttgaagagactcgacgaatggtctgggagaagaaaaactggcagttctcgtggcttgtcaaatgaagctgaacaacatgcgccattccttctgctatcggtaaaaaaaaatattcccagaatcccagaaggaggaagggtaagaaaattcacgacttacgttgatcaccctatatatatatccagtctcatactgaccgccctcccatccgttcgtcccaggatagtgtcctgcggtctccgaagccgactcaccgtcaagtagagagcaatgttcaggtgcttcagtgccttcgctcgaaacgattgatatcttattgggaacgagacagctcaggtgaataaaaaggcagcaaactacaaaagatccgagatacgcacgaacggagatgtttgaatcggagattttctgtgttcatctgacgcagctcacctcgcgtcctttatcttggatcctcgtcgcgggatctctgcgccgacattcgaacgaaaacagaggatcgaatccccagagtttgatttgaaacacggattacaggcaatgggtccagaacggacccaagtacgggactgtgtcatgatgagagttgcgaactggtcggacattttccgaggaaaaaggcaccaaacgggaggttcgtgaatgagaaaaccgcacatgggagggacttatttatgtcttgaaacaattgaagggaatcaccatcacaggtttcctccttgattcgattatcacagtctgctcctcactgaacgagattctgaaaccctcgacttgctccgactgactgtcgtagtccagttccgagtgtttggtccggaaattccagtcgaccgcatgcaaagagcgtcgagaacaggggatcgacagaaagaatttgtccgatttggaatccggctctgcatcggatagggtccagagtcctgcgagttgatcagacatttgacatcttgaatccggaatcctcgaactcaatgttgctcgatgtacaacaactggtcatttggatgggatagtggacgtatcagccgttgcaccagttccgatagtctcagagaccgggctcggaatattcatcccggagagaggacagcatctcaagcacgcaattgcaacaagaggctgtcgaaaaatttcgttcgcgtttctgcgtgacaggtgccatgatggaagatccagagctgcggcctccgttcatgaatcctgattcagtcgcggtctggaagaaaatgataggggaaaactttgctcctagaatacacggagaatcgccgcctctggaaagatggcaccatgggcgcccgtcaggctcgccgctctacctgatgccggtcccgcctgccgggaaagtaccccggctttcagctacaccacaactctctcattcgcgggcatgggcacgaatgaacctaattgtatgacgctctccttccgaaaaaccatttcggggtcccatcccaccagagcgcggtcgacgtcagaaattcgaatttagcggctcttctttcgcgccgcctgagaataatgttcaggagcgaaggcggctgctaatgttggtaaacaggcgcagcgttacaaacggaattcagagagttttgtcaattttaatatggtgttatctcgaatgctgtgatagttgacgatctcccatagaagatcgagatgatcaacgagaacacacgtgagttccagactggggaacgagagacgctcctggaactctctcgggagcataattatactcacaggcaggatcgctcgagagctggtccaacctcgatacaggtttttaaagtcttggcgcggaagttcccccgcaggctcaggcttctatgacagatcgtccaatcaagcggggaaggtttccttgggatgcgttcggatcggagaacactagccgccactttcaaaggctgtgctgtatcacatgaagttcttcggagcgctgttcgttgtttctcacttcagctcgattactcgactccgagactccgaatacctgctcctctgatgtctaatcgacagaatgattgatgaagaatgctaggaagtacgggctctactcaccaaagtcgagagcctccggtaacgaattcctgggtgtcaacctcttcagaccttcatgggatagtagtcaattcaacgatcatggattctgttcgaagcgatccgaataattttctcgtggtgggaacttagatatatatggcgccgcgttcttcggggagcattatttgatatcacactctgaggtttttcgttttcagatcatcagaccagtgcgcccgcagaacagggagagaaaggaagtgcccggcaatccataaatgctgtttaccaatgtggtacctgtcaagaactcttcgagactgaatccgaagctacccaccattttgaggattgtagcaatggcaaggtaacaatctggacggtacagatgcctctgagagacaggagcgaacgtcctgtatatccgagccggaacctaactcgagaccccgttttttcagagaacttccgcaaggacttcagattccgaggcatcgccagcaggcaagttcgaggtcagcgtcctggactgccagtcatgctctttccgaacgattctcgaagactcgatgcatagtcacatcattgagaaacatgcctcaaccggatcctacagccgcaagagcactcgcttcgcaaaaacgccaacgatcatcagaaagaagcgtgaatcaagaggcggattttcatgccatatctgtcggttcaaggcagcatcgttccacaagttccgctctcatgtacaccgtcaatcgagcgaacgcgacatggactcctactactgcttcttctgcagtttctcatgtggcgaagcggacgaaatggatactcattgcagtgagcaacactcgcaagtcaacagcatcccccctctgagaatcgaattccgatgtttgagctgctccaaaatgtttccgagttcccaggctatctcagagcactcccagagctgcggactgactgtcgaacagaacttggccaaaatgttccctcacgctttctgtgaagattgttcgttcggaacgaattcgaagaacatccttgagtaccatacgatctcgctgcatagtacctacccctgctcggagtgcagtgcgattctccagacgaagaaagctcacattgcgcacatgcaagccaagcatgcgcaggtgtgccctcactgcaatataattttcctctcccgacaggcgttcgttgagcatgaagaacagcaacatgcgacagaaattacttgtgacttgtgcaaactcagatttcctgatgagaacagtctcagcgttcatgtttcgaaacacacagcgaagtcgtgcaccgtgtgcgagagaattttcgaaaccctcgaagacctcaaacagcatctcgtcgacgtccatccaaaaaataatatgctcggaaaaaacgtttgctgtttctgcttccatgtattctgtacggctgctgccttggccacgcacttcgaggaatgcaccgtttcgtcaggcatttgtgtgcactgcggcgaatcctgtgggtctgtggagaacgttctcatgcatatcgagaccaaacacgaggagattgaaatttacgagtgcgccttatgtgcccatcgtacgatcgatagtacggttcatctgaatcatcagctgattcatatggccctgcccgcaactgtgggaaaatcgacgtaccagtgtaacctatgtcaaaagtggaccacctcggctggatctcttcggacccacctcaacaatcacaataaactgaaaccttatcgctgcgaattctgcgaattcacgacatcttcaggcggaaacctccgagctcatcgcgccgtgcgacacctacatacttctgatactgtgaagtgtcaaatctgcaataggaagtaccggacaactagccagatgaagaagcacgtgaggaagacgcactaccaaagtctgaattaccaatgcggtatttgtgagaatcgattcgttacagaactccggctgaaacgacatttggcaatagttcattttgatgatgccgaagctgtgacgggtgacgaaccctacgcggggctgtctcgcttccgttgtgagaactgttcgttcagcacatactcagcgaatcgattccgacttcatcgagccacccaccgtgatcggttggagtgcccgtactgtgatctcagtttcccactccttgacgtactcaatcgacacattaatgtacgtcatttcaagaaacacgtcccgtgccctatctgtgcacggcgcctgccgaacgaggccaggctcaaacagcacctggaagcatgtcacgccagtgacgagaaagagctgaagtgcttaacatgcggtttctgctttgaatccatcgcgcatcttgagtaccactgtcgaagtcatctaactgtgaaaaacttcgagtgccctacgtgcaaaaaaaccttcaccacggcagcgtcgctttgcgttcaccggcagcgtcactcgaggcttgacctaagacatcgggggaaaacgtatgtcggtaactcgaactgggttttctactgcgatgaatgcaagctccgcttcaagtataagagtagtcttctggctcaccagatggtagctcactccgagaagaccgacctctcgtgtcacatctgctcgaagcaatctttcggctccaaattgcttctcagttaccacatccggaaacatttggaggagcgcgctaatatgtgccagtattgccagaaaaatttcttctcgccgggtgcgctgaaaaaccacatcatttcgatccacacgaaagcttacgagatctactgtcccctatgtgacaaagggatgttgagtcaacccagactcaaaatgcacatgatccatgctcaccgagagacgaagaagcgcaaaacaaagaaaatcaaagttgttcaagaggaaatcgaggaattccctgagccgattcctctggattctcacccagaggagctcatagccaccgaccagacaattctaagtcaggtgaggcacgctcatcgatgagccgcgatacatgcaccagtggtttcaattcgcatttagcgttcatcatgagcaccatattgtttttttttttcgtttcaaaaacgcctaaccatgtattgacactctcttcgtaccgtcctcaggaaattgtgatttcgactatagacgagcacccgactacagacgaggcgaacgagatctcaacggggacgaacgaagatttcatcagccaaattctagatgattcagactcccaacacctcgtgcagatcacggtcggatccgacggggatcagatcggagaggtcgatctcgcgggttacgtaatggaataaataaaacactaccagtttttgattttgtgtacgggatccgtgtcatgaaacgatggaaagtgagaggtgatgacttcgccccgtagccttgatgggggttcaactgttttgaacggaccgaatctctctgggtcggagtcggggccccagtagcgaccatattgaatgagcggaccgatccgctgcggtttctgatccggatagaactcttaccttacagactgggatttttcgactccggagattggttcggcgatgatggccgaacagccttcaaggtaatccaggtcttatccaaaactgagctcaacgatcgagcaccttcaatttcatctggatcggagttttttcgaagtaagctgaggctaagggaaacggccgacattccgcgataattctgtcaatgtagtatccatgatctcccaagaagctttcaaatgcgatcgagctgcaactcagcgaaaccgaaatctgaaaaacaatgcaagcaatccaaaccagattgattgcgacatattggcaaccgaaagtgaccaagaaagtcaaccaatcgttgacaatggccgttgtcgtaccctgtggctgggaacagtacgaaggagttcacatagtactggttgaggcttagggaagatgggtgatcagggaacctgcttgtgagctgtcttgaactaacgaagggtcgagcaccggagcggcccacatgttcgacgatgttggaggagcaccatcccagcgggataacatgatgttcctcctaaaggctcagccattcacagtcggcgaccggtggttgccacgagttctaccacaaatgaagcgacccctcgatggatggggaacgtaaactgtggggtaaatctcaattctccccattaaaataagataccttccgatagtgagcactgataagtttattgcgttcatcactccacggtcttcacggacaggaacaccgcaagtaccaggaaacattactcacacttcgcaccgagtttgtagctgccattcacctccattacccattcgtcacaatactttcccatgtttagccgaggatttccgtcaatcgactttcgcatcccattcggattgcagagagagctttcggagagctccgcggcgttcatacatctgttcgtaggaaaatagattcctgggggagcgagtctagaggcggaggcggaggctcgaacggttccgaaggtatctactgactactgacagcggagggaatactgagctcatatctatcatattctacgattgtgttgcgaacgaacgttgtctgccggcgctcgaatctctcgcgaacattagttatgggcgatttcctggattctagatgccgacgcagacctctctccacacggattcattacactgtgagattctctgcctctctaagcagagttcgattcagtctgatgctttcaaagtatatatatacaggtgaccgaccctattgtttgaatctcaccagcggcacgttcttggtcgctacacacttatcacagacccactcagcggcgatctcttgcgtcagcatatgaaacgcagcttcagtcagtccagtacaaatcctgtggaaccaaaaattgcagccgggttcgcaaaatacggcctggtcgttgtcgtgtacttctttgtggcagacaccgcacggataaatcactccaccgttctcgcggttcatatattggcctgcaatataagcatgcgacatgagatttgtttccagagttcagacgctcgtgctgcgccgtgtgagaatggtgggcatggggtgggagcttgaaagctggagttcggatctcacctttcccgggaggaaaattcttcgccagattaccctnnnnnnnnnnnnnnnnnnnnnnnnnnnnnnnnnnnnngtggggagggacccccgagaggagaacagccatccattcggctctgtttattgggcacggacccgttgtcaagatcatcgcattctctgcgcatcatgccgttcgttccgtattctgcgaacgaaacactagtagtcagtgatgggtgcgaaattcgttggattcgagcatagaggtatttgaacggggtagctaatccagagcttccgtccaggagtcgcgaacaggcactacattcgttattcgaaatgatttcgcgctcataacacatggagtaagactgttccctggtcgcctcttctggatcagaccgccgactggcgcgaaaatatcttcaaagacggaagcgcaatcagttttgcgactctgagcgtgactcgtgggacgcttctccgcgattcgttactcgatctcccataggcccgtggcattgattcacgtcgcaaacacaaaggttgatatagttgatatccaggccccgcgacgtttcgtgcggttggttcgccagccggcgcgcgttgtgagagtgcgagagttcgaatagtttccgagggtccggtccttagtgcagagcatacatcaagtgggtcgagcaagctttcaacaaagacgttggggacacaactggaaagtctggggcaaggtacccgctatcccgggcgccgtctcaatcagtcatgtcactgacgccgctcacctcataaaggacgaagagcagagcgagtcgaaacgcgaatccttgacacgcagggcactggcgaggcgtgtacctcaacaacaacacttccactcgaaccttcagaaccgtttagatattgttgatgtcgtcatttatgtttttcagtcccgcatcctgcctgatggttgttatgaaggtggcggcggctgtctgtgcagtggcaagggcgacgatgggactccggcagagagtgctgcattgagtcgcacgaagcgccatcttggtcgccaacaaagttactcatgtaaacaactgcgcccaatggagccgatttgaggcctgcgtttcccaaggcaacctgttgcttgtcagtgtcggagtccaggatgtcatgcaagttttccccgagaacatttgagtgacatcggacacagttccactgtttgtttccattcagcggggtcaagtcaaatggcgagtcccgagcaccacgttgttagttcgagtttcaattataaactacgcttcggtgcttgtgagctctctgctctctgatgcctccaatcggagggcaggcgattcttgcgttggttgtacaaaggtgaacagcggatgcccactcagctcatcgacggcgaacccaaaggcacaaagaaacaccgcggttctcatcttctgtgaaaagcattcatcataaagaacgttctattgagtggaaccaactctcttgggtgacgggctcaccccagaaacaactcacgatgcctttatcgctcctcggcaagaagtctgtcaaaatgcaggccgtcagggtttcaacgatggatgccgaactcgaattcgaacttccggtgagtgatcgactatagatggtacctagatttttcaccggtccacggctggggcaccgcacaaattccggcggtcagtttgtgtggtaaataggaaattggtctccagcggcacattggctagaaggctccgtgcacaggcagtttctcctcgcggacactgacacggcggcgatgagaagatcgcacggcgtatagatgaacagttgttgattatggtgtggaggatggttatatgggttgtgattcaggagagtgagagttatgagtagctacgggatcgaatcttcggagagtactgcaaggttgttagtcattacggagctgagccggggatttaggtgaacatgggtttcctgatgaaggaattgattgtcctggcgccttaagtggcgtgggttctagggcgaaccgagtctgctgaatctggattcggatgcatccgcttttgcgtgttgcatctcaacagtttgtttcttgcggtgctggaacctggaatggagatgtttgaacttgcaaaggcgaatttcggtttaatggctcagaaggtttgcgtctgtgggcttaatgacgacggacaacttctgaggggatacagtgattcgttctcccgtaggtaagatccgtacagaggggtggcgcatcaaaagtgagggcatcagctctcacactttacattccgttcagtacggagtatgaaaatgagttatgctgtggtcgtgatctccaatcagtgcgcttcgttgagtccgccactctagagggttggccggcccgaataagcccccgttcaccgtgcaccatctggtgcatgcggcaatggtgggttcggagagagatgttctctcagcgagcttgtgggttctccctttgatcgtccgcgtcgcgcttggaattcgttcgtgtgaaacgcgagcgttctttcacccggcgctttccagcaggagagaagagtgcagcatgctcccgggttagggtgtatatccatagtagccggccttcggccgtctacgctgggtggccttatgtccttccttgggaagatgacaacatgccgttagttccacgtcgatgcgatcaatcccggaggagttcatcgaggacaaacacacaaacaaacagaccctggatttttatatatacagatgatggtgattctgagggagttcgatacctcccccagggggtcggtggggatactctttgggcaaaccggcgacgtcgatgctagagccactttggatagcttccatatcattctgttcgcgagagtttccgaagctcactggtgggccaattttatcgtcagcggcaattttaccgggttagagggaagtaggactcgcgattccggatatccacattgttattcgctcccagatatagtctcccgaatctcccgattgctctttcgggagatcacagctccgaggactgtttgggccgagctgtcacgtaatcgaaagcatgcactcaaatgaagcggcctcgttggtattgggattcaatcctgttctccttccctagcaaaaatccaccggacgagatctgttcgagctcgtctgccgtaccataggcttacgcgagatgtggtatttcggcctgcagttcgtcgactccaaaggtttcccgacctggctgaagttcgataagcgcgtggacaaacaggactgcaagaagcctttatctttcctgttccttgtgaaattttaccctgaggacgtgtgtgatgaactcatccaagaggtcacgcagcatctcttctttctgcaagtcaaacaagctatcctgcagcaaggttggtcttcagttatgtagtgctaataataaataggagagatggctccacgttggtcatggaaacgagttgagtggagtctgaagagaagtccctcggatgttttacagatatttattgtccaccggaagcttctgtgctcctcgcctcgtacgccgtccaagcgaaatatggtgattacgacgaatcaacttacacgccgggaatgttggcgaatgacgatctcctacctcagcgagttatagatcaataccaaatgacgttggagatgtgggaagacagaatcaaggtgcatttcagaactttggcagatttgaactggttttgaacacccgccgtttgcaataaattcctggcggagatttggtggagtatctcatccaatggtgcaggtgccgctgttccttccggaccctcaggttccattcatcgtttccaggtttggtatgctgaccacaagggaacgacaaggaatgaagccgagatggagtaccttaagatagcgcaggatctcgacatgtatggtgtcagctacttcaaaatttgcgtgagtaagaacatcacattccagtgatcccgatttttgtttgcattcgggtgtattgcggagaacgatgttttccaatatgccatccactctctctaatgggtttcgttcgaacagaaccggaaagacacagatttgtggctgggagtctcagcagtaggactgaagatttacgacaaagacaacaaactcaccccgatgataacattcccttggtctgagatacggaacatatctttcgacgataggaaattcaacattaagccagctgataaaacatcccccaattttcttttctattcttccaaaataaggtgagaccatgaatagggagaacgagattgattcaccgatagcatactacatgtatcactccgaggacggctcctctggagaacatgatatctcgctcctcagtttgttgttcgcgcgcggagctcaagttattcatacacaaagctcccagtgtggggagtttatcgtacacggagttcatgcatgacgactcctccgtacaccaagctgattcaggggaagttccttccacgaggcgttcctcttgcgcacgagctcaccaacgccgcgaggaggaagctgtgccaaacagaacttgtgaagaatgtaggcgtcgtgtatttctatgggacttctctgattccgttccaggttgaacaagctgattctcgatctgtgcatgggcaatcacgaactctacatgcggagacgcaaacctgactccatggaagtgcagcagatgaaagcggcagcaaaggacagcaagctccggaggcagtacgagcggaaccttttggaaaggtatctcaatagctcaatgtcggaattcgtatcggaaccaatatgtgtttcctcgccatcggtgttaggagcgttctacgccgtagtgcaacttggtgccagagcagtggcccgagccacttactcaatgcgcaattggggagatgacagtaggccaaaacatcaaagctgaggttatctccgttacagagagaaaaaactgcgggaagaagctgaacgagagcgggtggagctgcaccaaagactcctcatatctcaggaagaggctcgagtagcccacgaagcgctccagaggtccgaacagacggcggacctcctcgctgccaagagtcggatcgcggaagaggaatcgttgttgctccaaaggaaggctgaagaggcggagcaactgaagctccaattcgagagggaaatggcgaagttcgagacgaaagcaagggaggcgagggaagccgaagtcattgctcagcaggtaggctctcaccaaattacccgattgtcgatgagccaggagggcaaaatatcttcccgcggtcggaggtagatctcactgcaacttttctgcttttcatcaccgccacgaacgtcaagctgtcggaagaaaaaattcaagagatgaatatgctccgcaaagagctttctcgactgagagcgcaacaagcaccgtcacctgttcccgccaacaacagcaccagcatgagtactagcagccccagtaacggaaacgcgaacatcaacaacaacagctccagcatcagcaacttcaactcggtaaccgtcaacgtgggcgtgacttcggccgccgtggatctcgatgattcatcagacatcactcagctcgcggaacagctcgagcgtgaaaagagctcctatatggctaaaacgagcagtgttcagaaacaattaattcagctcaagaacgagatccaagtgttgaagagattggtgagtgttgaacgttaactcttggattgaatcacggtggggcattgaaggtcgtcgcttttgactcgatcgattagtaaaagtttcattggcgttccaggacaccacttcttccatggatcaaatctacgagcaaaaacaagctagtggtgtcgacaagcatgtcacttacaggaaaacttctcaaggcgccacgaagagccgcgtcaaatttttcgaacagctctgatacgcagagcggacgctctcttaacagctttgaatgagactagccatgtacctgtatcgcccttgacttgggcgaggcccagatccccaaagcggttttgcgtcattcagaaaggagccgtccgagccccttgcatgcggtgctccagagtctgatatcagatccgcctcgaggcatacttcgggcccggtatccgggccagaagacatctgctcgacacaaccaatcatctagagatgtccaaagtaggcgcagtgcggggcgaaatcaaaagccgatgttgaacggctgaaggtacgcactccggattcagatagtgagtgaaacaaagtcgtaaccattttgtgccaaaaatctgttgatacccatgactgtcgtgttcgaaataaatgagaaatctcgaatttccatgcgggctgatgccctgtgggaagtcaaggcttgttcctcccgaggagaggttcgactcttctgggtgatagaaatccgacgcccgaatcgagttcatctcccatatttcaaagctacgccattctgatttttcccccggtgagttatcaacggagtttcgcaacttccccgttcagacgtccgagagatatggctctgatagaatcgagaatccagcctgggagtctgaggggaacattctctcaagttctctcccatacatatactgatcctgaagttgagcacgacgaccgccaatgcctgtgcagccgtgtaacgcccactcggcacttacgcgtgtgcgtagtgtcatcctctcatccgaacatctcagttcacacgctctgtgggtctttctctgggctctcgagatcgacgtcgggagcctcgagttccggaatcacgctgttccgccgttggattcttggtctgaggatgttcggacagcgtagattggaactgggatcttcaggcagaaatgaacattgaatccggctccagtcgggaacagatgacattcgggaacttttggagtcgtggaaaagagaacaaggagttaattctggtggagcaacggagcgtggtccaaacccgcaatggacaattttctgctgtgcaacgtcatggaccctcgagtagtgattcgactgctggttgaggttggaggagagcttggaacaagtcggaaacgtccacccatggctgattcctttatgtttggggagttgggaggggtaattagagacgattatgtaacggtggaagtctgcggatccctcgtcagcatacaccttgaattgatgaggatttggaccgggagcagaattacggagaagagcaaaacatggaaatagactggcaggagacagcacggggagcggcaagttcacaaagtactgattcagcctatgaattgtctccgcggaagtaggtggaccgcgtcgaatatggctgcaggaggggagaaatttcgggaagaacacatcctgtgcctctagaacaatagttatcccgtacctcccgtgagtcaaaatcatatttttggaaccgtcgttttgcccaaatatctgattcgaatatccctgcccgacgcagtctggcatgtgtttccgatattcccatgatcgtggtcagaaacctgtgacgagcaagaaagtgcctcggaaatcaacatcgctctaattgcgtgcgtgcggcgatgccgaaagaagatcgttaacagctgtgagcagcggctagtcgaagggctcccggtgtggcgaacgcaataccaaacgagcattcgctatccaagaatattcgatcgacacaggatcgatatgatgaatggaaacccacgagtttccggtaattccactcagacagcgcccttctatctgccgttgagatccttgaaatcggcctcctcagcgagccacgggcggctttgcgaagggatcaaaatgaagggcagcgaggtgtgatttttctacgagttcttataattcacgcgatattcgtcatgatcccgaaccaccaatgctcaaccgaatccgggggaaaaacggatggatcccctgtatttcaaagagcaatcggagaagagaaaaactgatccgaaaaaaaacactagcggctgagctatggccaaatggagggcgaccacgatcgtgggtcagctcacagcgagcaccctgtatactaagcatagacggaactgagcactcctgatacatacgtgaattctcgcgactatgatataaaatgggacagatgtgcccagtgagtgttgttgcgtctggacaggcactggaagtattctcctttgaagtcaggatcagtgttgggataagatgggtgtttccccatggactccatgaccgttattaggggtccaaggaagtttttaccggttttcgcattttaaaactttgacgaggccgtggagaagcacgggctgtctacggtcgggaacaatcgttgttgttgctcgactcccaggaacacaaacgttgatagaaatcagaacacctcctcccttttttcttttctttgagattcccaatgggagatcccacgccaggatattcgagcaatcttcgaccttggagcaacggcggccgagacggttcgcgaattgtgtactggttgagcctgagtttgccagaaaggaatcgccaccgcggtggatctttggagaaggtgtttagctgacgagggtgattacttcgaatggaatcctattctctctcctttcaagaaggttgtgggagttgaagttctgtgaacaaaacgaggaaaaaaattccctggacacctcatgaatcattgctgctgttagagctgaaactcttgaacgtccgaggccagaccacgattcgaggggatgacgacgaatcaacttaccggaacgttgcccaatgtcgatctcctagcccagccaggttgagatcaataacagccgacgttggagatgttggtggacagaatgaaggtagatatctgaattcttctgcgaattctagcgggaatatcttatccgatttggcccattcgtcgtttccaggtttggtaggcggaccacaagggaaaggcgaggaatcaagccctgcaggatctcgatatgtttgttatgagctaattcgaaatccgcgtgtatagagcattacattccagtggtcattattcttgtttgaatccagttgggctgtggagaagatttctgcggtttttcccgatatctgttccacaatctctagaggatttcgtttgtacagggccagaaagacacagatttgtggatggaagtttcagcagtcggaccggagattaacgacaaagacaacaaactcaaccccgtgataaaattcccctacctggtctcggaaacaaaacacgagtttcgacgccgggaaaatcaacgtgaagccagctgattaaacgtccttcagtctcctcttcttttccaaaatgagatgagaccatgaactgcggaaacgatatcggttgaccaaaagaacactgcatgaactcaatcattccgagctcggacgttcagggaacctgtgaacaccatgaatcgctgcttctcagtttgttgtccaccaacggagctcgagttattgatacgctgggcttataggacagacagttcttcaagcacagacttaatgcaatcgtacacctagttaattcatggaacgttgttgccacaaggaaaggctgaagggaaggagcaaccgaagctccaattcgagagaggaatggtggagttcaagacggaagcaagtgaggcgagggaagccgaagtcattcctcagcagtaggctctccctgctcaagctgattgtcgatgaatcagaagagtaaaatcgatcatcgaagattcacgagacggacatgctgcgaaacgaactctctcgattgggatcgcaacaagcctcgcaacccactcccgctaacgtcatcgccagcataagaacttcccaacccaatgacgcaaacgcaaacatcaacaacaacggctgcaacattagcaacttcaactcgtttaccgtcaacatgggcgtgacctcggcagccgtggatctcgacttataacacattcatcagctcgcggaactgcttgagggcggaaaaggttcctatgaggttaaaatgagcaactgctgaatattgtccttccaaagaggacaaggactccagagcttgtttcaagaaggcccctccacgcttcatttcaattcatgacattcagattttctcccaccgggcctattcctcctttcgggaacgccgaccgattcattgaggccattcaaggcgtttatgggaactgacattgggagagccactcgatgagaaatcgaagggcgtcgaatccgatacacccaaaatgacgcaaaattacttgaattctccaaggcagtggctctcaaacttcctcacttatcgattcccgggggtcgacaccctgagcgacctcgcttacgtttattacagctgttctcaaaatggtcgttatcgaactctggaagtttgtcgacgaccatccatttcctggggcaatatccgaggttgcgatgaccccgaaatcacatcgtgggataccgaaatggatggtcaaacgtaccccgggatcatctctctaagttagtgatcggccgtcgaccaccaggaatcgctatccaccactttgagaaaccctgctcttgggcggagcaaagcgagaaattcttgctcggacatccactgaaaccgacataatagatgttcagcacttcttgggccgatgggtttactcggaactcctacggtgaagcagcgatctattctgccgcatatgcggttcacccgaaggggtggcgcctcatcgaagtgagagcgcattctctttcacttcacgttcagtgatgagtacgggaataaattatactgcattcatgatcttcaaatgatgcggctagttgaaatcgactccgaaatcgcgctcggggtccgctactctggacgttcagcagcttctgcgcgcagcccccctgttccagcgacaggcagcgtctggtgcgcggctgtatacttatgaatgcggtaaaccatctcgtgagcgggtgttcacggaatcccagggggatcggcggttcgaagaagtttgaatgaaatttgacgtttggggaatgaagggaacccataaagttggataaggtctccttctctttcgacgacgattcgagggacgagccctctgttccgttctggaactcgcgattccgaatatccgtattggaattcgcgccaagataaggccttccgaatctcccgatcgcccgtaggagggcctaggcgtgactggggctccatcctgttctccttccgtgcagaaacatacctcccaagacgacatatattccagctcatatgccgtaccttgaactgtagcgagatcagatttcccggcccgcagctcttcgcctcaaaaagtttccagacgtggctgaagtttgatgagcgcgttgaggaaaaggacggcaaatgaaacgtctctcctgtgccttgtgaaatccttccctgacgacgtttgtgacgaactcgtccaagaggtcacacagcctctcttcttctcctaagtcaagcaagtcatattgcagcaaggttggtctccattcatgtaatgctggaaaactgaggtcaatagtatctacataaaaagaatatgggttcgcgttagtcatgggaacgggttgagttgattttacggcgatgtccttcggatatcttacgaatatttattgtccatcggaagctcctgcgagacgtaggaaggcagagttaaggcgaattgttgaactttggctgctgggaactcacatacaccagtattttgcaagaacttagcggccaattttttgcaggaataccttgtccgatatggccctttcgtcgttaccaggattgagatgcggatcacgagggaacgacaacgcatggagccgagctggtaccttgagataacgcactatcccgacatttgtggtgcaaggtactgcgaaattcgcgaagttcgatgctatattgattcaatgtgaggaaaacatccggctgattagcgttcgactgactcaaacccaaaaatttatcctctgtttgagcttcgagttcaatattggctgattctgtgtgatttttccccattctcatcatcagagtcggaagaaatgcctccggaccccgaggttgagaccggatcttccaaactcgagcatttctacgaccattgacccagcgtcgtcgattccgagctaacctctctgtctagctgaggcgttgcacctgagatggtgttttacacatcggcgtcttcccctgagccgcatagtacatatacaagtcgccgacgttgctttcaagagggcaaaaaatagagaatcctgggtaccatgcccgtttagagcctgtgccgtgcaatacgtcacatctccgtgctcgcgttccagccatggtttcagctcaggtaaacacttgtaggtccttcgacccttcgctccgtcgctccatgccgtttgcccttcattcatggtctcagaggattccttcatccttgcgggcttcggtacctgaagagccgagttcgaaaccgtgcggtagcatcgactgatcccgattgctgaaactcttcgtgctctctcattccactgcagatttccccaacatggaggactggtaggcggcgattaactctgccaccactgctgggatcctgttttggagttcggatgctgcgtgtgttctcggtagaatgtgggctatgtccatcgccgctttcatgactttcttggatcggtgttcacgtgtgtggcgccagttagccttgtttgaatttggactccgagttttctggcagatttctgattgtgaatttgatctccttgtacagtgattatcggagaacgttctccgtttttcttcacgagcatcacggcttctttttttccggggccagtgcaagttcatggtcggtgatccagcagtgaacgatgtttatcgcttcttcggcgatgctttcgagctcttcgatggtctttgccgtggcgatgattgcgagatcatgttcggatccttcatcgtctgtgatgcagtaatcatcctcgcgagaagccctgggcaccgagtcatcagaatttcgacggcttcggccgggacgtcgtctgcccctggggacctgtgtgcggctattcgctgtgctgcgttgactctgactcagttatattcgacatcaacatattcgaaggtgaagcaccgcttcgttttggctgtttttgtttctgcggacgtatgaatggtcggaaaaaatgaagcagaagtccccgtgtgatgactcaagttaaagagcttcaaaggtctctgtgaagtgaaagctgacccgattgagcgcgattttgttcgggcccggcggccgcacccagcggcactcttcagggggcggcgtttcaagggatagggtgaatacattggcgtggccaggtggagcctgagcaggctttnnnnnnnnnnnnnnnnnnnnnnnnnnnnnnnnnnnnnnnnnnnnnnnnnnnnnnnnnnnnnnnnnnnnnnnnnnnnnnnnnngaaggtctcttcggagtgttacagaatgcgtggaaggtaggcggacggaaaaaaaattcagccaggggaaaatcctggccacgccactggctgattaagatctaagattgtttcctgagcgaaattcctcgtgacccatggcccccaagaaaccgccttggcaccttttaggccatatggctccaggttgagaatcactgatttaggagataggcgctcgattggagtagttgcgtaggataggaggcagtaaaaatcgataggcggcggaatcgattcccgcaccgggcggcaccagagggatgcacgcccctgggccgtaacatgaacactctgggtagaatgtctccgatacaagatgaccaaagactaccaaagtggaccttcccccaatgtattcggttgcagttccaatgctctctccgtggtgccgctttgtgtacaaacattagcagccgtctgttgcccataacacgctttcgggtgcttttatgtcagacagatagacggtggccactttgtgcttgcgccatcggaaagcactgagttgacgagctgtgtgctctttagagttggacggtacaagagaaaacacaccaacgagccagtgctttcgtagtgagctacgcataactgactcagccctggtgggaacggaaaatatccttctcttcgcgctcttcgaccacaaagtttgcccctggctcatctgacggatgattctctctcgaaatcattcgtgccgcatactgagccagtcacttgaacttcaccccgagtcgctctctatcgagccggaagcggccggatattgcactgaacttgaactgaaaagaatctatggcgctcatctcgaaacttttcaatctcagtgctgtgataaggacggtgacagtggtcggtgtgatagccttctctatatggtataggaaccgtcgctcaagaactccccgaatcgtagtttgctccatcgatacggagtgggagagagtcgcggatgattttcggaagagtttatcggatggcttgctggggcttgactgcgaatgggtctccgtgcggtcgaaatcgcaccgcgtcgctctcctgcaaatggcggggaactcggagctctgcgttataattcgtctctgtcaaatggaagcgccgccagaaatcagagatattttagaaaatcccctaatcatcaagtttggagtgggcatcatagacgacgcaaaacgcctcgaaaacgactacgggatcaaggtaatccgctaaaaatcggtgtataactctactcacgcgaaggagcgatctaaggcggatcttaaatcacaagccgaccgtttccaggtgaatggttgtttggatctccgatacatggctttggcaaccggttacatggacgggagtacgaaaggactatccttgggagcactatccgctcattttgccaaatacgaattagacaaaacttcgagagtgcgatggtcgaactgggaagcctccagactttcagcaaggcagctcgtttacgcggctagggatgctttcgctggaatcaaagtcgcgcgaagtctccttcgacgttccctgctgcaatctcttcacagccaatgctactccaccttcgccctctacatcgacaaaccttttcgaatgagccccacgaagcaaaaaactgcgaaaaatgaatcaaaacctcgcgcaaagcgctcgaagggcatgccagttacgaggagtgaccagaagctgtacaagaacgcagtgatgaaagctcccgacggcgagattctgtgcaatacggatgtggtaaaaattgactggtacctgaaaatggatctggcgacgctcgagtctcaggatccgctcgtgataaggctcaagtttgagccgcaagcccgagctgtccttggtggcgacttttacgtcggcgaaaagcccaatatctgtgtggtatgcggcacggacaagatgctgctgaaaaaaaatgtcgtccctctggaataccgcaaactgttcccgccgttgatgaaatcacacacttctcacgacagcgttctcgtttgcgtcaggtgccaaaacaaatcgatccgacaggatgtcgtactccgggaaaccctggacgccgagtgtcccaatgaagtttcggctccaatggttcagtcattgaagcgcgcagcctgtgctttgaagagagcgggggagaaacttccggagtcgaagagaacagagttcgtcaagctgcttgaggatcacttccaggcgccaatatcagatactgtcatcgaagaagcttcgaaactcgacgaacagcagtggatgcgagacaatggcctcacgcacgctcagagagttgtcgcgaaatacagcgccggagaaggtttgttcgccttggaaatgcgattcaggcaacactttcttgacaccatggagccagaacatctgtccccgaaatggtcgataactcacaatcatgacgctgtattgatgaaagtggccacaggtagatttactggaccacaaaccctggatgagtttctcagaatcctgggagcgtcttggctgagactcggtgaggtagttactgcgattctggatacaggaatcgtggacgaaaataagatcgtgatatgggatgagctcaaagaggcgggaatcgaggttctgaggaacaaaacaaccaacgctgctaaatcctgagcaaaggccgggctaccattctcaccaggctcagttcgccagtccgcaaatctatgttctggttgccgcatcaatgaatcgatttttcggcttggggcaggcaagcgctgatcctgcgaatagatctctcaagaattaattgaagcctgattgcaatgaccccgaaaggaaactgaagagagccaaatgctgacttttaaaagctgttttatattgatcttataatacatttgatctgcggtattcatatcagcactgggagtttcaagttttccggggccacatgtactttcttttcagaccatactttttcccccgcaataaacgccgggcgtgtacttttcagctgctccagagagggagtgcgtctatcagagagagtcgggtgattcccagccgcccccaaaatggcgtcctcgaatgtgttcatttattttggcaattccgagattttgtcgataagaagcgtgtccgggggtttttcgagttgttcctctgggctccactgtcatcagccatcttcactgatgagtgaactttgtccctctcggaaaggtgcggaaaaaaactgggatgctcccgttttgtcgatcgaggctgagccaaccttcgcttgtggtgtagaggctgagagccttttcttgcctaaggttgggccgatctcgcaaacgggagttcttattcggcatcatatttctcgtctcctcactgagaattcgtgaccaggttcaggggccatgacttcttctgtagcgttggagggtctcggatgcacgtaccaaataaggttgagaaccactgtttcaaatgatctgattcagaggagtatacattccacgcctcagctcctcatcgtacgacagagcaaacgaccccctccagaggggacggctggttagatcgagggttagaagagacaagttcggacacgacggaagtgtaacgaagagctctcgaaaacgcaggttgagtcttgctcgcggcctcgacggatacgcttctcaacggcggaatgcggaatctccggactgcggccgcgggaaccaggcagcgggctgtggatcgcagtcaggagtgaaatgtcgcaattctcatgttctgatatggagtttttgatttcatctgttataatctccccacattgacccccttcgcattccgctcaggaaccattttagattttatccagccactcctggaaaatgccgccgcctaaaaagtgtcgctcggtgcggcccgcacctcctctgtgcacgctagtgtctccaacagcgaagcgaacacatcagattcgagagaacaggatccatttcgaggtttcaacggagcctcgtgaaaatcaggaatcaaattgagtttttccctcgaacgaggctctcctatcgtgtcgaacgattgtgttgtttcggaaccattttgtgattcttctacactattgtacatctggcaattgattgacaaccgaactgcacggcaaaccggtttttacgatttgtgcattccgtggctatccataccaggatctgagttcgttacccaaagacagtcatgctttggtgccctccaaagtctcgagaacattgttatatgacgactcgtcagactcgtcgactcgtgtgacgaggaagcaactctggtgatcagactgtgcatatgctgaatacagtttcaggcttcttggagacaggtgattcttcgacatgtctgaaacctgagtttgttcacccatgaatgcttgcgttatgacaaattgataaagatgcgtgcttggaatcctggcggcgaagagcaactcatccgtgttgaccccagagatcaccgaagcatccataaacaggctgaaaaccaagcattgatccgctctgatcgctgcgctcgccttcgtcgagtgagtacaccaagggcaatcatattgtcatcgtcactcaagctggtgctttcttcccgaggggaatgaggtgccggtgtcctctgaggacaatgtttcggtgatcgcattctagtatttggttctgaagtgtgccgttgccatgacgtccaggtcgcttggggacttcgctataggagcatacctgtgctagccacagcctgagtcgcagctcagggagtgctccatgttcctcacgatgagctcccatcaaaatcttttggaggaaatcgaccgtgaacagcgtttcaagtgagtcaagtcggaggagtgctccctcttggaatttatcttcaccgggtgatcggtggaatcaattgctcaaagagcccacatctgaacaatcgagaggttttcggagttttaagcactcgtgaatcctgcgtcgatcaaaacttttccccgagaatacgtggttcaatcgagaacattcaagtgctgacgattgtagccaagtgaggtgacaggtcatttgacctgagttgccatgacctggataaaactacgattgagacaactccgagttgaaccaatcggggttgatggagaccccggaatcgagtcgaggaccacatatcattatactccgattctgatatactttcgtcaatggatgacgagtgatgctctatactgagtccgggctcttccggagatactcctccctgatgacccgtgaagctcagtccctcatggatgtctcacggtgccgacgccctgaccagaggcagagctagagacaaaacgtgaagtttcgagcataaagatttttcgaccatttctcctgcagacatgtactcgaacagtccataaaagatctggagcacacagtttgccagctggaaggaagaagcgagaattcagatgaaagcgaatggcagctacggtatacgacacaggtcagtacatccgaatggtttcgctgaacccagagctgcggctaacgacgaatgtggagttgcagaatttgcctcagaatgtccgatccgagagaatttccatccattgcgcatctgtctctcggttgtcattctacgctgggtgccccacgctcgagatcctgagcttggattcgattccaggttgagctgaatcatcatctggaccaacagagagagtggctgcgaggccaggtcgaaggtcagcaggatcgtccttttttaggagtctcagagctcgacctcgattctctttcggaggtcagtacataaatcgatcgctgagcgatgaagcacaggcggaatgccgccgcgacccattctcgtcacaacgggatacggaatagatccggatggcgtagcgggggcgtggacgacggtagaatcggaggaatcacgaagaacggactccaaaatcgatccctgtgtgaccaagaacccgggactcgatgagagcttactaggtcatgaatttacaccgatggcggtgaccttctcctgtgggtcagcgcatgtcacgttgtagcccagaagccatctggctccgatgggttcaggctccgggaaactatcgcgcgcatagacttggaaatagcacttgaccctcgtctgagatgatcgccgtgttttccaggctcaattgatgaggtgcctgagacagcttgagaaggatagagacaatcttcgatcggatgttcgagatctggagtggaggttggatcaggtgagtcatctcagcccatgatggatccgcagcgctcaatgtgttatcgatggattcaatatcggaaggagcgctgttttccttctccgagacgacttctcagtcggatcgtcgcagccgtgcaaaagttgaactgttcatcgcctgtacaggagtcgaaagctttccacaaattcgatgaagcgcgcaaggcctaccagaccgaaataaaggatgctatgaccaacttagaggctcttcggtcccgagtgaaaatgatatccaatgattacgtcatgttcagcaagcggaagcaagtacctcatttttcgcttgcctcgatcaacacgaggcaaatcggtgaaatatatcctgttcatgagagaaaagctttcgatcgtctgctaagcaaacaaggattaactgtgcggtgaattccagaggtaatatcctgccaaatcaacgggttctcgatccgaagcgaggacccatcaggaagatcgctgccgtccgaagcctcccaaaattgaacagtggccaccatgatcggagctcgggccacatgagtgaatgaaagccaagtcacgatttcataatctctgactgttcctttgttctctgcacacggtgggaagtacttgcaactgtaggatagactcacagtcaaggagctcgaggggtgaaagatcggcagaataagtggatgagggagagttgtttgggcagattccgtcactaggcttgggcgccgaaacttcgggaaaaagcttgttttgaaaataaaaaactgatatcaagagaatcttcacgctcattcaaggagtcccgactccgttgtgcaggaatcagagtatccgtcgagtagatgttctacacgtctatatttttgttgatcggtggaaagtgaacgcagcgttctcggtgcccgacagacaaaccagacaacgcaaacgcgacaatcgacgcgagattatctttgagtaatccgagatgttggaatgactctcaggttcgcaatcaacgctcgtcggtcgccttgaatttcctgaacagatgtgttctcgagctcgtcattccgccgctcactaagctgacgagtctcatggaatcccgttccctgattcgacgaacacttcaaatcgttgaggtcaatcctggttcggcgttgaggtcgagaacggagcctccaccagaatagcataacaagaaccccgagacgtcttcggctcggatacttcagggaaatgtccagatggcgagctgtgtatgctccacgcgttcctaatgaagaccaggtctcatgagtcaggggctaaagcaggaatatagttggtcgattgcttgagacgaatggaagagaacgatatcacttgacagggcacagctgtacctacccgcaatcattttcctgcatgtattcaatcacatctaatcagcagacgaacctgcaccgcagaccgctgtaaacatcacaccgggaactccagattccaccaaagatttctcccaagttatcggctcttaatccacgagtccacgaataacggtcgacggaagcttttcgaccggaatttcaatgggtccaagtaaaccctaaccaccaacatcgatcactctctgctcacgctgcgaagggaatctggacaatcgccgccatctcttgattaggctgtatcagatgagagtggatcggtttccctgtggaggcacggaaccagggtggatctaaagaggaatgttgccgtgcttcttcggcggattgctcagcttcttatctcggagcatgtgcaggtcccgacaaatccgcatccgagtggtgtgaggttctattatgtcgtctacaaatccacgcactgctgctgggaacggattcgtgaacttatcgacgtagtcctgctcatgcttcgcaacgtcgtccgagccccgatacaggatggagacggcgcctttagcgcccatcacagcgatctcagccgtaggccacgcgtagttcacatccccgcggagatgtttcgaggacatgacatcgtaggctcctccgtaagccttccgcgtgataatcgtcactttgggagctgtggcctctgcgtaggcgtagagcagcttggcgccgtggcggatgatgccgttgtattcctgagaagttccaggcaggaaacccggtacgtcgacaagggtgatgatcgggatgttgaaagcgtcgcaaaaccggacgaatcgcgcgcccttcacggatgagtttatgtccagacagcccgcagcgtacttagggttattccctaggactccgacgctttcgccgttcattcgcgcgaagccacaggtcagattcttggcgtagttcggcatgatctcgaagaagtcgcgatcgtccacgaggtccaggataacgtcgatcatgttgtacgcctttgtggactcgaggggcatcacagaatccagggaatacgcaggccggtcccagggatcactgcaaactcgacgcggagatccttccctgttgttgagcgggaggaagtcgtacagccgtctgagttgaatgagcgcatcgacatcattctcgaaagctccgtgagcgacgcccgaagtttgcgtgtgcgttttcgagccgccgagttgctcttgcgtcacgtcctcatttgtggaagccttgaccacgtctggtccggttatgaaaaggtatgaagtgtctttcaccatgaaaaccatatcagtcatcgccggcgagtacaccgcgccgcccgcgcagggccccatgatgaccgaaatctgtggaatgaccccggacgcctggacattccgcaggaaaatgtccgcatatcctgcgagagattcaacaccctcctggattcgagctcctcctgaatcgttgagaccaatgactggagcaccgacgagcatcgcttggtccatgatcttgcaaacctgaacgaagaagaatactttcagccgtcgtccgagcggaacggtttggtcacttggtactttcccgaaattttccccttggcactcgcgagaactgctcgatgagtgattggagaggactctttcgctgaagggaatgcgaacgaatcatcctctgacagggtgtgctctgaccggaactcccgtattctgagatttcagagccgttctgagcttaaggcatttcggagcaaatcgaagtttacctttttggcgtgaacggagctcagtgagccgccgaacacggtgaagtcctgagagaacacgaacaccttcctgccatgaatatcgccgtgacccgtcaccacggagtcgcccgcgaatttctgtttctccatcccgaaatcggtgcaagtatgctccatgaattggtcatattcaacaaaagagccgggatcgacgagcaggcggatcctctctcgagccgagagttttccgcgtccatgctgagccgcgatccgcttctcaccgccgccgaggagtgcttgagaccgccggtcttcgatttcctgcttcactctgagagtatgagctacgctgcaccaccttccctgaactgcttgcgtacgcagatgggacagtggtgatgaaagcctcgacaacatggtcggatcctcctagaagacacaagcgagacgagatgatcccacagtgatctgattccggtcccagaagcctcgaggtgcctcgtttctcacaatccgtttcaaatagaatgaaactttgacaaaccgtaggaagtcctttgcgttcgcgtctcgatgcgatgattcgtccctcgccgttccggagtcttctccacttggagagagggagatcaccaagacgtcgcagtactctgggggaactcattgtggatggagtgcggcagccactgcgaatgaactccccgtttgttagctttccaactctggggggaatgagtccaatcgccgtttctcaagagcaagcattgacagcagccgtcgggcgtcttttgaggtgtaaggtctgaagacgtcatcgcactttctcggtccccgccccagactctggctgtgactgatctggtcgagcggttcaggcatttgattccgctgttctcatgctgcgaaatctttggaataacgaatgagtgacactgccactcccaaaaagcaggcaaaccgagttctccgggagcatgagctccgggtcaagctcggggaatacaatctataaactgtccgaggattgtgatctagtttctttgggtcgtatgccccgcacactcacttcgacgataccacggatttgacgaagaatgagaaactatctctcgaatagcaagcggttcaatgatagcatcggaggattccgacgatctccgctctcgagccaacgagaaccacccacagcagcaattattcgacgctgcctccaaattacaagtcactcaagatgggtctggcttcgtagggactctcaagccggaacgataggacgagccacctccactgacggcgaaattctacgttcggagttacattcttccatccgtttcgagtcaggatcgtttgagatcctagaaaaagattgacagcatagaacactccgagtgatactcatatctacacttacagtatcactcaaacagcgtaagctcggtacacagcacgtcgttacgataggttacgttcgttcgacgggtccaaatccaaaccaaagaagactaaattcgaggagaagcacatttgaacacacaggcgaaagcatttcgagtattcccgcctccgcgagaggcgctgtcatcggtgcggcagtacacgtcgctttggtggcactttgtgttctccgataagtccttcgactctctcctctacctcagacagcccgtgcggtactgtctgctttcaccggaacgacgaaatacagctgttcgatagggaatttcgaaccgaacagcgctgtaaatttctcctgaaagactcgtcataaaatcttcactatggaattattgaggcctgttgcgagcttcgttctacccgggaaatgtttcgactcaattctacttgatttgaactttggagacggtgagtagaagtttctgcttgtcaaaccatcacacgaaacgacgatcatctcgaacatcctcattgttggtcaaaaaccgcttacatccgatcagctccccgtatcaggtggacatttcatgacgatggtttcccttcctggaagctcagtggctcctacaggccacacgacgacgagtcgaatcacccacccgtcaattgtgctcgaagcctgtaaaaggcgaagggatgtatgagattgtcgcccatgtagtcgctcccatctcgaccgatttcacgacacgcaatatattgctccagaacatctgatccttccgaacctcgttcagggatgctaagacggagaaagaagatttcgctccctcgggaatagtctaactcttatcctttctgacttgcagtgaattgtttgaaactcgcactctcgaaatgcctcggctacggcatgatccttgggggctccctggttaaattgccgcagattctgaagattttgaatgcgaaatctgcggcgggtctttcaattctggcagtggtttccgacttggctggagtgactgcaaccaccgcgtacagcttcgctcaaaagttcccgttcaggtatcaagacgaaccccgcctcggcctcctcgtacgcctgggatgggctttgaattctctgtcagagatcgaacgctgctcgagaatccacaaaagcttattaaactacggcttttctattacagctcatatggtgaaggtgctttcctcatgttggaaacgaccctcattcttctgcttgctctccactaccaagggaggactctcttggcttcattgtttgctctagtctatttcagtacctgtgtggtctgtttctcggacactctcccaatgaacctgctctggtggggacaagttctggccgctccgaccgtgatagcgggaaaggtgggttcttcagtggtcgacaggactgccatgcgaactcctgttcgaatagctaaggagtccactccttccgaacatgtcacgcgaccaatctcagattctctctcgaggaaacctcccaaccaagttctgccacacccaagatcgaagctcacgttctaatccgttgatctgtttttcaagctatggcaagcacgcgagaacttctacgcgggtcacactggacaactgtcgatgattactatgactctcctcctgttgggatgttcagcgaggatattcacttcaattaccgaaacaggcgaccgagctatgattttgtctttctccttcgcggcagtaaccaacgcgctcctcgtatttcaaattatctattattgggatgccacagaaagaatcacaaagaaggctgccgacaaaaagacggaatagatctccgcggggctgcaagaaactagcggatcgtcgatactatggttccaggaactgcgtttcaactcaaggtctgtgagtaggaatatcagagagccctttatagagacagtcggtttcgatgtctcagccagacttcgactcaacgcactcctccgatattggacgataatacagtcgagagaccctagaacgattcgaagacttatgagcagttcgaaagcgatagggatgactacttcttattgacacaattaccgaacagaattcctttcgtccgcggagtcctttccgtgagcagggattcgcaccatgatctcagactttgcggttccgttcagaggtgaagagaacgagcgtgtctaaagctcttcccgagagtccgatcagcggtgtctgcagtcggttccgttttcagctcgatatgagatcaagcggatgaactttcaagttcgtagtgcaacggaacactgcgaaaatgtttagtttcactgctgttgttattcgtcagatcctttagatatccaagactttattcaatcaatgccaataaattattcgtcggaccaagatcttccagtaaatccagcgtgagcctattggcgagcttggcgaggagttcatcgagtccggaatatgatatcgagatcattgacttcagaaacgggtgcatgggagaagcaagttgggacgtctctttgcaacccactcaattgatttccttgagttcccaagaaaatcacgggaattgtccacaaacacaacagggttggtgagagcatcaatgctttttcttgaatttcgctttcgcgaccttgaaatctttcttcccgtgatgttttcccgaatctttcttgaagcgttttcctgtttccgcctcttcgtcgtcatcgtccgcacgtttgttcaagctgtggaagaacacggataacggtgaactcacagcacaatggatttcaacaacgatatggaactcatctctgtgtaggactcacgttttgatagatatgagtgctttgcctttgttaccgagggccgtcttccattcatggtccgttcctttgatggaatactgttccaggttgagttctttgaggagatcctctttctgtttcttcaatatattactggcaccttcttcgagttcggctctcaaacttttcctcaagggcttcatctggcttccgtcagattcctgaggacaaatggatcgtcagcctcgatctgagatcagggagggtgacaagagtaaaagatgcaacgcaaactgttgacgaatccatggagcgcaaacttgcctttgcaccaccgaaatcctcatccacgatcctttgctctaagagttgttggaaacgggtcaaaaatttgcgcatggtgcgattgaaaagacctgcgagagagaataatcatgccattagtcgcctgattcgcaggtatctggaaattcgacagtctcagtgaaaagatcagcgataactcgtgcagcgtggcctcgctttctcacccaagcattggactctatcgatatccaaatctttcgcaatatcctcgacggtgcggtgctgcagacctacagcgagcaatatgcactgctggaccaacgaaatatgcaagtcgcccatctgcccgaggaagaaccattttgcggcagtcggcatcatgtccatgacgaggtgatagtcggcgagattaccacaatactgctcgagtctcttcacgtcgtaagcgctaaattctctctgtagatcatcgagcgtcagattcgtcacggctgtgtaggcgctgttgactataacattcgacgctaacttcgattccaggctgcgcagttggaagcccaggagcgcactgaaacgttttctgaaatccttgaacagtaatgatgtccaaggctcatcgtggagagatttaacctggaatcagcgatagtgtgagccttcagatcactgcacctgagtccaaacagaagtcggctggaaacagggtgttccagctctcaatccagaatcggacccccaagttaatgaagctagagagaatacgaaccacgatacatgaatgctcgccagtcagttcgtttggtgtctgtcggacgtagaccggggcgtagccaagcgacttccaaaatcggaaaaggttgttggtgagaccgaaagaaacaccgaggtaatcgagctgacgtggtttgaactcttcaagtttcaacagaagcggcggaagtgacttccgcggctcgatgatttcgctcaggagatcaggaccggattccgtcaactcatccataacagtcgcgtctgtcggttccgactctgacagactcggatggtatcctgaaagatcgagcatggagatgaaacatgatcgtcctcacaatctgacttactcatcctgggcaccgaaactctcctccgaaattccgccatggagcataccctgataaaactcagccagaagctgcattgctcttttcccatagcccatggactggtagtctggatgcgttgctattctgacaattctggcaccagaatattttgcgaagtttccatcctggaactgctgtgcaacagtccatgggatcagatcgccagatggttgctggtctcgagacagatgataagccgcagaatctgaggatattccgccttcatagcaaagttgaatgacgcacagaacttgaggcagcttcgaatcctggagcggtccaaggagtacgaaaatgtggtgagctggagcgtcggagagcagctggagatcgttcggcgagtttttgtagtgagatgccacgtagagcccaacgatttcttgcaggaacagttcggaaaccttgtgataactaaacaacgaatctctgttcacgtagaagagctgacattcactcggcggcggacaaccggcaccgttcatctgttgaccgatggtcgcgtcgagacagagcagctggtttagccagcgttcgcaaagatctccaggtttgtagcggatcgactcctgcatttggaactctctcagcgaacgcgaagagctgtcagcgcccgcagtcaccgagtccttccgaagctgcgcaatcagcttcaaactcaacgagcgaccggttccttcgtagccgtttatagtcgacgacaagaacacaatgtagtttcccatgaggttcttcacaactggaagaggaatagcagctgcctcgtctatgatcatgagttcggcttgtgcagcgtacttgtaatcctgtggatggatgtactgcacgatctgtcggggctggttgttttgatgcattacgattctcacgatgctcttcttgaattcagggttggtgctctgcacgacgtcgtaatcgatgtgctgttcgtatttcatcgcgtcaaatcctttcacgacgaattcgaaaacagttttcaggttttcaggggagggtgccgtgacgaacacgttgcagtacctgtggaaaatcgtaccaagttttgggaggtcagggttttgaaaaccgacgacgcccaggaacgagatttccggagagaaaagaaactcttcccgggttctcctgatcccaaatcatgggtaactttggtcgaatgtcgtaccctgtagctatcgctgcggcgatcgcgaggccgagagaggcggacttccctcgacctctgccggccgtcagtgccacagtagctttcatacttttctcggcaaggacatcgagcatcaacatcagagcctgaatttgtgatgtcgtcacgcatagattcactataggcgccacgggtgcttcggacaacgatgctttcaattccgtgagttccgaagacgcttcgtcgctgatctcagatgctccgatgggagtgatgtgggccgcttttgaggatagtggtaggatgttgagcttgtcgtcgacaacctagatggacgattccgactccattagcttctgttccttcaggatcgtgccaacgcatagggaagtcaaccaggatgggtgcttaccagacaatcgggatggtcggcgagggacaaaaggaatctctcattgaatctgttcaccaccctcgtatgaacctctgtcctgtatctggaatgaacgtccatcgtcattgtgtagagttgtttgagggattcgacggtgtgaaggagtatgcagatgattccgccgccctctacggtttcaactgttctggcgagtatgtttggtgtcatggcttcgaagtcctggagcacgagcatgcctggaggaggaacgggttggaacattcgatcatgaatatgattatggcttgcacaactcttgaactcagaatcgtgaatattgatcggcggaggcgttcctaccgaaagtctgtcccagtattttgtgcgtttcatggtagtaggtgtaccggatctgggtcgaagatacgaagagttcgaaaggatcttgctcattgacgtccatggttccgctacgaattttcttttggatttctttcatccgcttctgtcgatgagtcgtgaaacccagattcttcttgtaacaccacaggacactaggccgtgccttaaccacactcttactcagcatatgatgtaggaggaccacctacgattgtcgaaataggagtcaacatctggcaggagactagcgcaaggggagagcgcagatctgatctcctggctcatcgcaaaggaatctcacttagagccactcgaatcatttaccggcctcctttagcgcaagtccctactatatgaaaaccgtgcacnnnnnnnnnnnnnnnnnnnnnnnnnnnnnnnnnnnnnnnnnnnnnnnnnnnnnnnnnnnnnnnnnnnnnnnngcaacaccattctgaatgaggactcggattctattgtcgatcttttttctcttgattgtcgaagaacctccagcctcgctcttgtcgacacccattatctccacagagttgcttcccgagaaaaatgaaccaggccagacaattggtactcttcaactcagatctccagtcgttccatacgatcgaagaccacctcgaccgcgctttcgggttattgtggtcgcaaacgacacacacgtgcttcaagcgaaatgtaaacaataatgatgactatgatcttgtccgtcgtccccgtgggcgctctgagagttcaacagtagctggtattcggctaacagctgtcctgacatctaagagaaatggggcttcagattgtaactgagaatgaccactgcgatgggaggaattcctgccatgttgtggaggtgaggatgatcagagctatcgcactcgctcggtacggacggatctcagggcgcacattctcctcaccgaataaatcccgcgccggtgtcttctggctgcgccatggaggcgtcctgctcctgggtgtgttgttgtgatggcgtgaagaaaaatcagctgatgctatcttggtcccaaagtggtgcacggcattaggaccggattcggaatggcgattccccgctgggttagcggtatacgagaaagagtaactcatgtaattcgattccctcggctcaatgaactctcagaaagctccgctttaataaatgcgcacagatcatacgaaaatggttttgtgagccaagaatatttcagagaaactggggtcctcagatctcacgcaattcggtgctcgaagttttggtcctccgcgcgactccgtcgatctcgcggttcagtatcgaagaaccaatgacctattcagtcgatcgatcgccgcttcgaacatcccctgcactcgtgccaccgcagtgtccagtatggacagccgggctctactcagaacgcgatacgcgattgcgccgttctgcaatctacattcttgtccatcattcattccattcacggacagctgtgccgagtatcgttctcgtgagtatttcattcagaaatctccgcgagattcttccttgactgagcttcgggttgagagcacttgaccgcgctcctctgtacgagtcagcgtgataggtttccagaaccctcaatatttgagaattcgcgcgctcctgcggtctgctcgctatcctcattgtcggcaagcccccattttgaatccggtctcattacccagagccccgagagtgagggcaagtgcgtgtctcttcttcgcgagagccggcagagttctgagtaattgttgacttctcccggcaatcgtagcggtggagatcctgatcgatctgtttaggttcaagaagcgggacatttcctgaagggcgcggtatctgtcaagttctggttcgacgtgtgtccgtattccaccgttgtcgcaggtgagctcgttttcattcgcgcgaatgactctttcaagagaacatactcgcgaaaaaggagaacttgatgactgcgtcagttctggctccataatttggaaatcctgcgttgaaagttttacgatgagtgtcccgctttttcgttgactcagtacatgagatgttccagaggggcaaattgaatcaagcttgttccattcattttctttctcaaagtcaaacactggtataactttgccgagtagatttgtttcgctcacgaagatggatttcattggatcagggaatcgtctactgaagggctccccgttgaaaagtacgaaaaccacccataggcgtcctgctaccggtcaagatgggcagcattctgctctgtaaccttcgacggtatgtccgcggtatgattcctacgtgataatattgacttccttggttttgctcgtcgaaaatgttaactgtgagctatgaggtttctttaacgttcgcggcgaccgctcaccctcattatggacatctggagaagcattcgaagcgtggcttccattcgaggaaatctgggcgatcagacaaatttcgtcacctgccatgtctttcgctccatgccgcgctatcgccagttcacatttttgtgatgtcgtcggcttctttgctcttcgtgaacgatagtgaatagtactcagtcgcgatcaactgcgcacgatttgaagggaaatgagcatctaacagccggcaaaaagcacatcaggagagagaagttagccatacgccatcagtcgagactccgaagtgatgaggagttctcgagagataccgctttccgtccgacatggcatttttgacccgcccaactattctcccatgatttttgttcgacctgtcccactgataacgagctcattcatctcgtcccctaaccgacagtttctgttcagatcgtggacatggagatgcgggactctccatcaagtctttcccggctccggttttttcggtcataaggtgcccttcatatgaatcggataaccggaccagcttcaggagccctgcctctgcaatcgcccagatttgctgtcacactcttctggatgcgattcattggaacattcgttcaaatgctagatagggccgacttgaaccaatgggacagagctgtcgagaagctgattggggatcatctaccacgtaatttgccaaatatatacatgattcgacttgtgaatggagcgtcgcaacggatatgatcgtccaatctggcaatcccttctcatcttccttctatcagttcctctcgtaggcccatcttacagtgaacggttaccttcgtgctcaaaagcggacgtcttcttgtccggagcgaatttgatgaattacgtccgacgaaattctccgacattggagtcagggtcaacttttttctcttcattctattttgaggggctccgttcccgatccgtttctccagtgtttccataaatcttacacacacacgaattcgaagagcagactcgctgacgagccgccggtcagtcagctggacccacgaacgatgggcttttacgaaccgaaaatacaccttgaactcgtgcaccccaactcaagggaaattctgagcgagccgaatcatcttcgatattgcacgctccgacgtcgggatgtcttggagcttttctggaaggtgcttcagtgttcccgaagcaatcttgaccacaaaaatgattatccctaccggcaacaatagtaaaaataatgatacaagaaggacaacaatgacagcaactactacggtcactcggaaacaatatgataataagactaaacatgaacggcagatgatacacaatgaatcgagcacctgaaactgaagctaccgggcgagaaggtgcgacaattttccgatgcttttctggtactgaccgttgaaaacatttgctcaataccgatccaagtgttgattctgccattcattcgtactctcgcacggatcggaattagaggactcccaacgcattaagctcccaccatgattttcaaccgatcgtgtcttctatgcggagctccctacactttttctcctgacccccccgttccatgttccagtgagcctagcgttcattaggatatctgaccaaaatattggaatcgtgcgcgaaagcgtccgagaacaggtctggggagagcttcgaatacccagcatgagaaagttcgcgttgtcatggagtaccaacttccagagcagttattccctcagtctttgtttaatttatttggggaaacaagatctggcgtgggaatcattctatgttttgtaacgaccaacgagccgaacaagccgtgaatcattggccataagaggactacactgaaactccgccgcttttgatggattccttctgtttctggagtttccgaagactctcggacaatatatcacgaacaaccgtgcttcctcgaaacttcctccgagctgccgcgcgatttccgcgagggctttgccaggcgacaccataggaatcgcgacagcagggactgtcagtcgtgacaaggtgcgaaggaggcgagagtgaaaagagagaaattaactcccctatggtaaacatcgagcgttatctgcgaaagtcgcacctcggggtacgacagaccttgatactttgtttgaatggtgtcagagcttttctctcggtttgcagaatccgttattacttgacaacgccgatccgtcgacattagggtgaacgctcaattttgagcgcccgtaaaaacgaggagatcttgtgtttctctctccgaacacgagcttattccactgggtgacttaatgtttttctgagaacgtctctggctcgcgactgctcttaacgagttctgcgaagagctacgcatcgagcattcctgctgaaggcgcgcaactgattgcgcagaataagccgcgaaagaacttgaagattgaggataattccaaacccaatccagacgtgaatgatctagtcccaaaggatattgcacagagtggcatccattagcgcgagcagtcatgaaacctatcccaaatccatgttgcaggctcttaccctgatgcttccctctgtttccttccgaatccttgggaaagagagagggcatggatcggatactcaaataggcccaagcatcatactgagctgaccacatggccatgtcgtcaccaccaatccctccggagggatctttcctgcactgttttgtgctcggctgtatcagcccgccagacagcgggctgagcttcgatgggttcccgaagctagggaaagctgccatctagagcagctgtcagggctattctgggagagcaaacgaaattagtgaacgaacacttgcgcaactcccgatgagaaagcgttcctattgcagcggatagatagccttagctaccgcgagtctagagctggcttaggaacattatcgagaggagcatcgacatcatccgtgagcgtgacttttgggaccagtggagagatcgcgaagacatccccgtcgcatctgatgcgacgcacgctgagaacggacgcccgttcggactgctcgttccgaagctctcgttccccgcgcattcaaagggaattagcgtcggcacctcttccattgaagtcgacgcttccgaacgtggcatgagatggtcgaagcaattcgatggaactgatggatttttgacaacggagtcaaaggcttttcaaaaggaagacgcgtgattttactatgccgttctcgcttgtccaacgccggcgagcgagcagcaaaaaagcacgcgaacgagtgagcggatcaatcagataaaagccttgatgtgcttaccaataaatgtcaagctttgcacgatgacgatcggaatttttgaagcagtccgcgttggcagcgttgcataatcaccgttcgggatcggagctactcggacattcattccttccgtcctagttccttcctcgcgattcctgcgtttccgaacaacgattcgagcgaaaaacacaggctcctcagaaccgagagccagtgctaatcggagagcgaaatcgatttctctcgagtttgagaagcctggatcgtcgaagtcgacaggctcagcatatctgagtcctcatctcttcaagctgtaacctcgccagtctccgctgctggcatcgattttgagcgtgtcgcacgcacgatatcagcgggtgtgcggtgcgcacgtctgcggcttggcacgataaccaatccgcgtagaactcgagagtcttcgttctttaaataactaacgttgccacgcctgaatgaggcaaggatgtgccgggaacgatcacgcatgctgtaacagcgaatcctccgggtggccgggcaccctcccctcgagcatcgccgcggtagcttgtgcctcggcgtcgagttgacagcgccaactgttccgagaccctctcggaaaagacgtcttcgaatgccaaaatacctcagttccactcgggcggcagtcgcagtcagaaggccttgcggccatggagtgaagctcctcttggagctctcttttttattgttgtcaaaacaacgaaaggcaagtaatcggcccttcgaccgtgttgctgacccggctcaggaggatgagcgcgaaagtcaactcgagaggaaggctcctgtttggcccgtccacgaaaccggacgtgtctcgtgagaagtgtcgactcgagcttctgtgagcggaggcgatcgcgtatcggatctaacacacgcgctctgtgcatttgcagcatccgaaattcgtcgacggagcagcgggctgtccctccaggcccttttcccctccgccgcatccctagcttcagggctcgcaccgaccaactccgcacccccctcccacggaagtccgtcaccgtcccactcattgctatccgtaatgtcgacgacatcaaggaacagttcgttctcggccgatcagtcggacatcacttacctcacccaggagcaggccaccaacatcgatgtcgagctgtttggcgaatacggattcaccatcgatcagctgatggagttagcgggcttggcagtcgccacagcgatcgcgaaagcccaccccccaccgagtaagggacctcctccaaaagttctcatctgctccggacctggcaacaacggtggggacggactggttgccgcaaggtgagtctcactcgttcgcgaaattctcgtcgagtgccgcggtgagtccgttcgaaggtagccgagcaggctccgagccgcatgtcattcacaagcaatggatctgctcgtttcagacacctgaaatggtttgggtacgacccgtgcatcttctatcccaaacaaactgcgaaaccgatctttgcggcgctccgtcaccaatgcgaagaaatggagatttcgttcatgagctttctacccgatgccacgctggtggacagcaatttcgctctggtggtggatgctcttttcggcttcggattcaaaccccctgtccggccggagttcgtggaagtgctccaaaagatgtgcagattcaaggtagtcacatattcgtagtgtgctggtgtaggatccgtacgagctcaagagggagcgcaagagttggttcggtcaagcgttattcagatgagtcatcaatcgcgctcaggaacctctgtctcgaagtcctcggaaactgtcgctcggggacttcgaagtgcctttggcggctgcagcttccgattgcattggttcccgcagagctgcctgtcacatgttccctagccgaactaacgcttgaccccagttgacgtcccgatcgatcaaacgagattcaacttccgaaaacggtgaaacgctgatctacaacggcggtcggacgatcaaccatatgttggaataatgcctgagccgtacgtcaacgtttcatcattttcgggaggagattgtttggttgcgaccaacaagatcggcgaaaatcccgacgaatgattgaccatcgtgtcaatgttgaaagcagcgccaacgtgaacgcatgctcttttgcgctcttctcctaaacctcgacgttgctgtcccgtaaacgtggatggcgctcgaacatgactcgaactgaaatttcgctttccagacgcccatcgtcagtgtggatgtgccgtcaggctgggacgtcgagacaggcccgcatcaagactccatcaagccggacatggttgtctctctaacagctccaaagaaagggatgcaaaatttccacgggaaacactacttgggtgggagatacatccccagctcgttggcgacgaagttcaatctgaagctgcccaagtatcccggcaccgacctcgtcgttcaactcagttgaacgaaccccgttgagaacttcctatcgaggagggggtgggaagcagccagcgaagtatcggagagttcgttgaggaatagcacttgagtttcgcgaagaaaagctcccgagtctcagcctattaccgtcaggtaacgcacagaagactttcgggcgaaacatcgctgctttcatgtcggtaatgccgatgtctgccgaggatcggagtcgttgcgtgtgtagtcacacttcccgcatttcatctggacgttcaccgctttctctcgattcgaacggccgaagccgactgttttcatttgttcggacattgcatcgctagctacggctcgcttcgagatcatggtgtgaacatcagctcatttaataaagcacattcaaacccatggatatttccgatcacttcacacggcggcggccctagcgggccaagtcacgggcttgagaaactggtgcccgagcgctggtctcaggtcttgggcgctcaaggaggagtgtgttcacaaaaagcagcctataatttgccatctccgaagactcacaagcgaccgacgattcgcttatagccgagccagccttatgagcagatgtttccctgcactcaagtagtcgccatgtctgtttcacagcataagaacgcgatctagacagaacccccgtaatcaggataataatttcgttaaggaccgtcctgaacaatcgaggagaacatctcggtgactaaccaagtgtctgccccgagctccatcgagcggtcacagtttctgcgagaattcatcgttggcttcgtttcgatttctacggcgcgtgctccaacttcgagagcaaacttaatgacctaaaactcgatgatcgactgtaacgaatggaactttgtcttaatccctacttctagaatggtttcagaggtcgaccacccttccgaagagggaaaacaagctcgggaggttccgagtcccagaagccgacgacgacgctgattccgaatttagctcccacaggagctgtagattttccacctccctaagccatgagtgcttctcctcgcgaaattctcgaagacgtttctctgagacatggccgtcggaggatcagatcgagagctgtgtccaagcatggggagcgatgagcgaaggaagaatctgagtcccagaacagcgaagcgaagaagaatgagagtgcgagagaatatcggtattaataaccattgaccggcacggtcagttggacaacgacccgttgttgtctcaagtgcagtgtcgagccaccataacataattctcatcccaatgttttttctcatcccaatttccgcgttattggctctggctgggggcggtggtagcaccgtcgccggcaacgaagagtcggcgcggctctatcggcggtcaatcctcgtcgtgaggagcgttctggtcgacggagggaagaaaaaacaagattctgccgctgtcttcacgggagccaatccccaaccagaaacgattctcgtctcaatggacgtccggtcggggctggaagaagaacatttcacgaggcgaaatacggccaaccatccatgcgtccatccagccagccaactgaccgacctaaagccaaccatacacagccgttcaaatctggcgaaagttacaaaagcggggagctggcacacatcactaacagtcgacggaaacgatattccaagcatgagctttcaaaaccccgccgcgagaaccacaatccgatttgtcaacggcgaagtctgaagttcatcgctcacgaccacttgccccggatcgaaggttattctatcgtcaatctcccgagaacgattgttcgaaaaggatactctgaactagaacgagctcagtggatgcgttcccaggcatgactccatattcgacatccatcaacgcagagatgcatggctgaaagtggtatccagatacttggatcgtgcttgatgagcggtgagcagtcgaagcctcagaatccagccatcatcaatctatccatgtggacgggcggatggttattgatggtcgagacgtgaactctcaaggttcactcatgttctaccattggctcgtgccaagggataggcccaagctccctcgtgatccttcacagcggtaggggcaaccggaggttctcgaattccaagttgcattcaggaggtcccagctcacggaatccatgtagtctctggctcccaaagaacctttgactcctctgagaactttgatgaggcgtctcgcccgtcaggcggttctgcctcgtctgcccatgggaaggctcgaggtggcgcaaaatagttctcgtcaatcgagtcacaaaataaagctggaagtttgctgcggcatgtctgatgtagcaccgggttccatcgtgtcgttacgatacatagactgcaaacgtgggagacaaagagcaaacacaaatcttatcgtcgcttcgtgcaggagtcaagtggagaaaatctcgctccggaacaattgtgatgaatgactccgctactccctgaggaagtcacagatgatgacggggataaaccttacggcttggcaacaatgtgaggacgcacaaacggtcgatatcgtggtcggcttcggagaacaaagcgaacataacctcccgagcgcgatggactcatcagaagagcttccccgctcgacacgttccgtttgaggctcccatccttcgttcgcccacggggaaacgcaccttcctcgcgtgttcgccttccgggagcactatgtgggtcagtacgtgattcaaggcgctctccgatatccaagcggctgaaatcgcagccgtttgacagcgtgttattttatttctgaaacgacatcggccttaaccacattagggagcgtcgatagaagcttcatttacgacctgaccaagcagcaaacgggccagtcgcgcgattcgcacagtgatcttcgttcacatcgtctccgtcgttcttgcgcgtcatcatttttctctgctctttcgacgtttttcttcgccgaagaagaaagtgaaacatttcgaagtgctccccgaggcgctccccggctcaggatcttcagaaaagcgtttccgaaaagaaggaacgacgtagaaggaaaccgctgcagaacgtggtcgaagctaagaacaccgtcattctgtggaacgggaacgctattctacgcatgctgaccgaacactaaccacgctgcccatcgcagtgggtgactcgacccaccaatgcgcaaaataatcaacgagcagatttttgggctcccattcgtcaacggaaggaccagatagcggttttccgcggatgattcctcaaacggtccgaatccagttgttccggcgatgagatcctgatcgtttttgagatggtcgttttatgaactcttcaacttgtggattgcagacttttcttccaagaaggacgaagaagaaagttcaagaagaacgcttcgcgaaatccaacgccaatttcctggtgcatgaccgagttgcgacgtgtcaataaaatcgagtggaagggaaaacgtgaaggaaagtgagatacacttcgtcaagctgccgacggactcattccagaagaatcttcacagcacgccactcatacgatcattcagcctgacgcttctttggaaaagtcggtccacggcagaagtgactttccctttcgcacaggaaacattcacttttgccagaaattgaatgaatcatgacatcttgcaggaaggagaaggaagagatggatcatgggggctcgtgcgctccgcaaaatcagtccctacgaggcgatgcgctgacatgatacggtgccgattcgttcagcgtgtacttaacgcgaagtgcgtcgagcgtgggattgtggtaatcggtagcagcggtgtgattcgattttcgaaagctcaactaatgtaaagccggagactgaaactctcacagtagaacgagcgcgcggaggaagcgcgatcgcactaatgagcccatggaaacaaaacgagcggagataacaaatcatcgctcattatgctcgctggagtcgaacgaaccaaaatcgttcatgaagtttactcgcttccagttgcgttcttaagcgaatgaaggggaccgtgaaattgtgcgaagcagcgtttcatcaaacaaaacgggtctccggcattctccccagtttttgcgaaactcaagtgaaagtatcagccgcgtcccacgaaccggatcgtctcatgaattcgacgggtcttttccacaaaaagcggggttcattccaatggagtatccggagtaatctgatctgagcctctcgaggaagttggggacgaaactgaaacctgaggtcctgaacaggtgcagatcgcatttcgtcgaagaccagcgcggacggaacgggctggagctgtagatctcgtaggggttgaccaaaatgatcgccaccgaaaggaacgcatcggagacattagttcctttcggaatcatgtcagcctcgccacggagcgtctccgctgcttcagaagacgcggtgcgttcgatgagccgcacactaaagtttttgcgtcgaagcagatcgcgtgacgtccagttaaacgaatgcgttagcgtggtcgtgcgcgtgaaaactgtgttttcttccggaggaggccacacatacgagaacggaatagcaaacttcacaaagaaacggcgttgatcagactcgccgagcagttcggaattagcatcagaacagtgcttcctctctttctacaaacgttgttctatgttcatgcgtgtgtgtgacagacataatgggagaagtcggggtatcaatgaagaaactagctgaagggataaacaccaagctatacattcatgaacaaagtccaagtttagcgaacgatacgtagcggtagccaaatctaccgtctgctcggtgtgaaagtatcccggaagaagtcgcttcagtttcttcgactttcactgctgcaatgttcggtccatgccggtccgatgctgaccgtggacccgtacgtagaagcgtctgtcgaattctcaatatcggtacgttcgttcaccggctgcccggtagacgtgagtgagtgcatgcaggagtcggtgggcagtcattccgtctgaccggagcgttgaagttgttgtttgcgaacagattgtgtagctgagccgccacgaagagcgtgttgttatcgctcagcgaatgagccaatcgagtcgagatgagctttttctaaccagcacactgtagcgaacaaaatagaaaactcataacggaccctattggggagtgttgtttcttctcccgtgcccatcacgacggatcttttctcaacagcaaacaatgatgctgaccgttcggcaaagtatcgtacgatgaaagaagaacacagtttagaagggttcctgtaccagggagacgcatcactgttcagagaagaatgaacgcagtgcatagggaagattcacaggagctttgaaaggaacacactctttttacttctgtccttgatggaattgtggatgttccatattttcgaaggctcgcactgttccagctggattacgcaactcacaacttcaggtattctccgtatgatttcctggtacatccgtattaagtctgttaagagtcttctttgatagtcccgtgttcatgaagaatccgaatgacggctcgctccggatttccgattcaagagccgggatagagcacttccagctatggaaaatatttacttcacgtgaactccaagccgaaaatactttcccacgacccgcaagggcgtgaacggcacccgacagctccttctaggacttcgtcgttttcgtacgcctctgaaatggttcgtcggctactggtccgcgaagggtttgccgtttcgtgagctccaagaaactcttatcccaaagaatactccaaattctttaacatacccaatccacgatgttccgcaccgattcttagtgaggaacctgccgtcttccagctggagctagcattcggatcattcttgtcacggaaactcttctcgagtcgtttctgagatgaatattcgcgagcaatagacagatactcatgacctcaatcgtgtcctgattcgtacgcatcgattgcatccgaggaatcagaggacttccaggaaacgaaaaaagacagcgggtgttcgggaaacacgaggcaacctgagcgtttattggactccaaccgggagcatctcaggcaatcttcgatgaactagttatatacaaaacagcaacgagaaaagcagcaacaacgtttcgtggcagcatatgaagcctatgcgggcgtccggacttttccttctggattctcctctgaaaccatctaagtgccctcacggaatcgagttgcgtcgagtcaccgggatgccttcggtcggcggctctcacgagcgttctcggccccggggagaggttccaaaaagtcgactcgcataactcggaaatcctgacgtcatcgaaattataatacacttgtgtgcgcgtgcgcaaggcagctcgagccgaacgaatccgagttttcgtgatccaccaatctagatgtcgacgagttggacctgcgtcaaatagttgaaagtaacgacctggaaaagtttgggctattttagaagaggatttgggaggggcagagacccaaggataccgtgggtgcgatttgcggagttgatgagaactttttgggcctgcgagtgacagcccgtatcaaaactcgtgacccgcttgtttcgaacttcgtgggagcgccttcatgcgtgcagctcgctccccaaaataacggcaaccgattcgacctaacggaacgctgatgagtgaactcgacgaaggattcccatccggatgggttccctgataatccgttacgcgcggctacatcggaaaaatgaattctcgaccgcggctcgaaccttcttcggagctgacggcggtgagttcctaggttgggaggacacttccgagtccgatccggaatcagggcctgatcccgaagacagcgaacctgctcctcctccacctcctgaagtagtgttgaaaccagtcttgatcactggccggagttgtcgcgtcgatccttgcgatttagcagggctggacaacttcgcctgcggatacgaatgacgattaaagctcggacgctttccgcgattccgtcgtgctccgccaacaaatcaaataagcgtcctactggacttccgcgttaagtagacgcagtccccgcacttgctgggttttaaatggtttatttctgtgaaaatttttcgaaaatctccatcgctcaaatcgggctcaacacatcaataattcagactccctgctgggaccggggattgctctgcagagcacgggagatcccgaattcaaaaatagaatggggctcctcgaaatccttcggacaatggctcacctgttgaaagatcctgttttgacttttggtaactgtgctcctgcatccgggcggctgaagccagtatggtaaagagagcggtgcagccgagctgcagagcaagctttcgattggcggaggtatcatgtaagtgtgcgcgctcgggggcggtcccaaagatagaggtggcacctgcatcatatgtaacggtcgtctgagtcgaacggaggctggcacgctgagcgatcggcgatgttctgcaaaacagggacgaaaaccataaatacacccgtcgaatcagctcctcgtcaggcctcgagagcccgacggatcccctcggaggtcccggggggggagcgtaccactccaaggagcgtacgaccgtggattagaatcagcgctggacggttgcagcgatagcctggggctctaagggaaatcaaatccaggaggggacgccaagagttgagaagtgaagctgctcaagcgggtccgattcgaatctgctgctcgcatttcacccagacccctcttcctcccaaatcctatttttttttgcgttcgaatattcacgcagtcgaacgacgtgaacatttacttgtcggtttcgaggtggaaaaagcgcgtgtgcgtggaagctgatgtatcctcctcttctaccttaggctcgatcgtcaactggtgagcacccagctgaacggcgagctgctgatcacactcgtcgatgcgctgtaattacgctatttttatgttgccaaggaataggggtatccgctggagacaaactcagttaagtgcggcttctcccggtctgatcgaacagaatcagcgatgaacatgagttcaacaacggtaggaagaaacgcatcaggcttcggtggcagctcacatgggagggtgaactatcctcgaagagcataattatcaccccttacttctcgatcttccgcccactgtcatcctaccgtggcgatttcatggcgatctgcagttgtgaacggtgcgcaacttggtttttgtcgtgtttttttttccctgccaggcctcgaatcaatccggctcttcccggatttcctctgctctaattggcgtttttcctcgtcgatcgtatgactccacttttgggctctgcttaagttcgtattcaggtgttcgagccgcgagttgaccagcttcgaaacgcgtcgatggtcactcacgtgccgcggaaacgttccgcggtgaggagtggggggaagactgaaggttgaagctctccatacacttcgttccctccgcccgtagtcagtgaatcagaggaacggggacgtttcaggagagggagccctgcttgggctcgatgtagcagatcaggctggacgacggaatctaggtaagcgacaaagttccccttcagccgtcgtgaatgggccgcataattatccgctccattcgaataaggcgagtaaaagaagtttaatcagtgacttccttgtaaagagctgtcaagttgtgctgcagcgggttcgtgaggccgtgtgtgggtctgcgttaacagccgacaagtttgaactagtgacatctttgacgtggtcgtcaacagcggcggcgacttccatgcgggcagttcttcccatagaagaaatagtagtctgatagtacgacttccgccggaggggaagacatctagccagccaggctcacggatcaaccagagagacggactggcggacagctaggcagtggcagaagtgatcgagaatgatgagttgatgctacctctgtctcggatccgttgagcttggttcgcatttccccgaactttgccgacaacgacagcactcgacgaaacacaatgtaaaatttgaatgtatcgtcgacaccgaagacgccttgtcgtcatagtgggcgccttccaccaaagacaaaagcttcaatgattcgtctcagatgctgtcggccaacgcaccaacccgtccgcacaacagcaacaacacgggccaaacaaggagctgtgacgcatttgtttgattctccaacatttcaattgagccatccctttcgttcatcctttcattcattcattcattcactcagccattcatttcgttcggtcatccagactccttttcagctcgcccgggccgttggtcggtggcatcgacgcttacagccgcttgaacaaaacggtgcgctgtctgtcgaaatcccatgctgcaccccttcggcacaaactcgacacggggactacgatcgtgtagactgacctcaccttttgtttctcggagatgcttgagttgcttgcatcacatcacgatacggcatctttttattagccgacagctcggaattcccgagggacataatcgaggctcgagatcgaccaaatcggttcaaaatagattccagccttgtcgaggccggtgtggatctgaattttcggatcagccgataacgactgtgcttgactttattcgactcggagcggataatctgaaagattcgggaacggattccgagaatgcgttcggcggagcgtttgttgtggttcttgcccatgtcaattcgatcccgacaattgacaatcatgctcgaaaacggtcattcacgcgacgttttgaagtgcgccatgactttcatagctgtacccggcctttgataaattgcgcgacattcgtaatttcacgttgtggcataccagattcagcgaccgcccgtgctgacaccaactctcgaatgaaacctaattaaatgtctgcaagcgatataaaatatttttccagctgggataattccttcgacagtttgctgattcgttcgttgtcgcctttcgacgaccgtcgccaataatcgcgaagaaaggtcagtggagccccagtacttgccccatagcccaaagcgctatcaatgaggaaaccgtcaggcagctgttcgaccgaccaatcgcccgactaaacaagcaatggcgttatttatcttcggtcagttccgaaagcaacttacgcagtgctgcagcggatcaaggaacgtaccgaagattacgggaatgtccactaatcgatcggtaacagtgttgctcaccgcagcgcacgtgacgaacaacgccgcgacaccacctgaaagcagccgtttcgacttttcgaggcaactgtttctcccgatttatcagatccaagtgaatcactatcgtgtgtccggccttcggacaagtgtcatcatatgagcttggaaattcaggcattcatcagtttatacttccctcccgtcgatcaatatggggagattgacaaatgagtctctgataactgagattatcagttctcatggctcaaatcatcgagctatccattcatctacccatcaagccatgggttgacggatacaatcgatgaataatgcctgaacttccagtcatcagtgaacgaatggaataaagtttagccagatcaagagaaaacagtattggcccaattcgctgcctgcctccgggaagagaaagctcttctacagttccctcacgctgtcttgacactttcctcgcaagagtggtttcccgatcgaatcgcgggtctgggaggatccctcgatcagtttgtctcttcctgattgatgaatgatatcaaggagcttagatctgattccaccgagatcagaaccagcgagcatcgataagctccgacgaggagtctcaaagaggagcagatgttgaccaaaacagttcactcttgtgtctccggtcaacgctcgctgctacaatccagaccattagcaactcattatgcagtgttgcacaatacgcggtcttgaaaacaatcccgcgatgcggagcggagatatcaaagccgcgaagtcccaatctggatggttatcaaaagaccgccgaaggagaagctcgggagtctctcccatgtctcattcgctcgttgtggagcactcgagtcgacaaatacacagctatcaagcttgttctttcttgacggaggatcggtgcgcgttccgtgagaatcataccgaacttcttgagcaggcctctagatttacactcctgctccttccttttgaggactcagaacttcttgaggtcgtactgctcgaacatcaacgagacgcggggtttgaactttgagatcgagcaggagttcgatcggacccgctgactggctggggatttgttggaggcaaattcggctgccttaatccaattacggagcggaacgaacatctatcatgagaatttgatctttgcaacaacaacggttgagcaagcgacgtttcgggtggtcccgctacgacacgagttgagggagctccgccggagcagagattctcatgagcgccacgtcactcaacgattcgcccttccaactgtttaactgcaaaaaaaggaaatactaagctaacttagtttagtgtcttctcgggccgtctgctaatcgtctgggacagctggatttctattttccccccttcggcgcagcaagtatgcagcaacaggttgaaagaagaaagtgtaaagagagataatgataatacggtcgacgcgttaattgtccaactcggcttcaacggaacctggtcgcgttgtgagaagccacccacggtgggacgtaattggttcctgggcgtcatcgttgctgcgtcatggaagtccgaaacggcgacgactgcggctgcagcagcaacaacaacaacacggttaataaccgcattcaaaccccaaaagatgcataacagggcgtgtgtgtgtgtgtgtgtacgtggtcaccgcttgacggctcagtgagccagtcggggcttctccttgcgcggagctcgccttccaccggggtttagatcccattcgaagagcagtggcatcatccctccacagcgagtgttctcgcgatccggaaaatccaattctggttccgacgagagtgagaaatcgagaaagttcctctttctgaggaaaaacggaatcaatgcactggacgaaccagaagggctcctgggcgttgcatgcgtctgcagggttgcggagctcacttactagaactgaatagaacctgcggcgagcgcgaatcaaactggagacatagtgctcagacttccacccgaatcacgcgaggcgggagcgcgaggaagaaattcaagctcacaatgagagctttatcgctttctggttcatcttttttacgcttccctataggagtgttccatccgccacggctccaatcgccgtcggcggcgactgcggcaacttttcattcatcggtttgattttgttcgacgttccgagccactccaactccatcgttgctgggaacgcgtgcgttacttcagaaaacgtcaacagaacgctgcgatcgctcagacaaacattcgtctgagcgctagtcatccagccgtgctccgtgccggttgcaaacagaacgcgtcgtctgtggtgaattgcctcgtcattgttgtcaaatgtttcttcttgattcggaagagttgtagcggcgctcgacttcgattttccgattcattctcgttttgagtgttctagaagcggtcatcagagtttgagtctctgtcggtctctagcagagggcgaattccgcgaatccttcgctgaccaaatcataaacaacgaacgaacgagcgaaatcccttcgcggagccaatcttggtcgaacgctacactgcgagaatcggaatccaactgtttattatgaataaatagtcggcgctcctcggatcccgtgtccgatgaatatcgatgccacggggctgtttttgatcgagtgagctgggccggctgctttccttatgctgttccagctacattccacagacgcgttgcaggctacgttcgtcgtttgtgtaattggcgtcacgagacgaaagaaatgcaacgaaactcttgtggggtttcgcggcgagaaagtttcgcggcttcggcgcagcggcccttcgtcggcatggtagccgaccgaccaggcaagcagctaaaggcagccagccactgaactgacactcatttacgagaagaagaaacttcctgttggccatttcgccgtttaccggagccgcgacgcaatgaatgcaccacgatgccgtcgatgcgactgcatagtccgttgacggcgcgattcatctaaccatacattagctggtcgacgctcgactgtcttcgatccctagcagcggtccacccattcgtccgatccattatttcgtccgatcagtaagtcgcaaaaccaaccaatctatccagccttctgacgtacggtgtggggcgtcgggaactccggtggcggacctctgtatcgggtgctggtgaggcgttgacaaaagttctgataagcggtctgttcaaccgatggatagcgaagttatcacttaaccgtcaattatccgattaacactgtttcggggcaatcggacgaggacgcgttgtacccgggaagaagcatctccgactccgcatttgcgaggttgaggatcgatgagcgttttccctcccccgagatgagaatcattccgaagagcttcccagaaacgaactggataacggttatgataatctagtcaactcagtccggaggaggcgagcaagctgtgaccgaaaccgttttttttctctctctcccgccggtacgcagtaacgattcccgtacgaaccactgcatggcacttctcgttgacgagagcacaataaaagaaagctgcaagatcgtaagcccacacactggttcgggcaatagtcgtcgcggatgggacggccattggtcacttatccagcgaacttcgatacaactgccattttggggaatttgtgcgaacgagctcggcacgatcgtctgaaatcaccgcacggctacaataacaaccgctacgtaattccgccaccgtcgagccaacaatgaatggaagcccgcaaaaaatgaatcgacaaggaagaatctgaccagtgtcggaccaccaacgtccgtcggcacctcaggagcttctgtctccatcctgagggggaatcgatgcacgagtttttctctctgaggtcttttcctcagaaaaaatatttctatcaagcgcttgcttttcactggaaaaatgtctccgtcgccggcacacgagatggcttgatgctccgaaaattgcggaatttcacccgattggtggcaggatggtacccagggctcgaaacccatcggacactctagaaaaaaaacacgtcgggaagaaagcaccataaaaaatgaaaaagtagtcgaaagtattcaaaacgtcagcaacttcatcgactcatttttgtatgtaaccgtagccgtcctggcgaagacgggagtcgaggctcagccgctcgcgcgaactcacgcaggcactgttccattggcgagtttttgtccgttcgtttctcttctccgaagacaggcccatcgatcggctgtcggaattcaatcatgtagctcactgtccgtgacgtctcaaggaagtgtacggagggctcatgcttaaagaatgtgcggctggggttcggtcagctctcggggcggatcctccacatagtatagatctgcactcaactgctggcacaagattgctccgaaaacgcacttcagcgaggaggttttccccgaagatgcaagctttgggtttggattctcgaagaagagaacttgtatcagctcctctctcggagcagccatgataccagctgactcgcgaaaactcgaggaaaaaacatacctctcgcaagcgcgaagctagcgcaccggaagaacctctgctccctaaatgaaagtcaagatcgggacaagatacaatcgaaacctattcgtctccccatcaggcctgaaggggatgtttcctgaacgagaccggaaagtctggcagcggcgctgatcgaactcgcaagcggtatcataatcggggagtttcgtggcaggcccacgaaccgcaagagacctatactacgtcacgcacagtccttcatacgttgcgcgggatacgactcggagaaaaagctccttaatgcagctctgaagtttatcattacgctgaacccaatatcaacggccgaatcccccgattcggctgaattcggcgtttcggcttctgagtacttcgatacaacacctcgagtcacgcagcttgtcccgttataaacgccgctgagcaaacatggcgcacgagttcgggcgaatggctccacgatcattaaaacccattgaattaaagccgcggtcttgagagccgtttgcggaaagaaacgctactcaggaaccgttgtgctcaagtctggcaacgactttggtttttcttgtccgttgccgtgaccaacggtcgattcgtccgtgaacggagtttcggctcctctcacagatattttaattcaatacttgtggtcaaacttggagcttgagctcggagttgtaatcgaaatcctgagcctagcccccttgaattcgcgctcggttttccgtcgagttgtccgacctgagcttccatcaaacgacccggattttctcgcgtcatgaatcattccataacgatgctccaaccgagactaatgagaacctatatctaggcccacgttgtggagtttgactctgacataggcgctgaacgacacgagctgctcgttctttcctgcatgcaaatagcgtccatttgcggattcgaattgttcaacactcttcccgattccaggaaagcgtcaatcatgtttacagctacaatgaaaagtcgtgaacggtcgccgcccgtccattgattattggggactgaaatccgtccctcagagaaaaccaacttcttcttgcgcattggtccaaaaaaccggaaccctgacacccgaaaccagccaagataaaggctatcaatgatagctgcgaattttcgacagtaacgacgtaatgtcgagcgtcaaacagcatgatgatgacaacgccaaacactcgggaggaggagatggcagtgaaagtcgttattaacgatcgccaggctgagaaaaatcggtccggcgagtcaatctgccgaaacacgaacgataacgcattgcggagcgctctttttttttcttctctctgtcacgactcacgacagcaagctttgccccgcggagacttcgcttgttaaaaactgccaacgtttgatgggcgcatgctctcatctgatcctccgttattcgcggggtgacttggtagtgtgacccgggctcgagcgacttccgcggttcgactcgagagtgaaagattagtgttgatggttcgaacgtgggaatcgatatttgcggcagagcaccgagttcgctctatcagaagccggcagctgtggagacgcgggcgcctgcttcaggccgtccatggcaccaggaccaagatcggatggctaatagtcctgggaaacccaatctgtagagcagcctgttggtatcagacgtgatgctttgtcatcgtcgagtctcagggaactcgaacaatcgcttccgtgtatcgaatggcagagctctattcaaacgcatcgccatttggcgcttcaacgggccaaaatcaaatggaagacgaaactaaaaaagacgatgaaaacctatacgtcttcagcaggattcgagcacacatcgacactcggcagccctttctcgccttcgacgtggttgggtacagattcattcacgatgccccgaaaatcccttaacggctcccatggtcgacagggttccgaagaaagagcaaacacttcctgaactcaccgcatctcttgtccgatgaccgagaaaggcgtgatgagctgttttttgacacggaatccgtttttttagcttcaggaacaaatttgacgtgtttttccaccttgttgttgcaactgttttgcgaaatggcactgtttacttcacgagatgacgatgagaacgatgaagaactatcctttaggcacttgctcaggggcatctgaggtatgggcgctcgatgctgctccaggggcagagccatgctgcctccggcgagcaccatggggttcgacgctcttctagagagccgccgcggtctagacggaacttggagcagctccgcgataccggacaccaactcttgagtgtgtttctcgtttgacgtcgacgtagactcatggtgaggtgtgagagacgcgcgcctgccccgtttctgacggggagggggttctggattatccattttgatcaaaatcttgaggccgttgagaacgctcagcactctcgattgtttttgctgttgttgtcgttgttgttctgacgagcactcggcacagctgatcgtagaacaggcgaaatgactcgcgcgcacacgtgacaccgttaacaccgaacgtctatcgctgaatgaagccaccgggcttcaccgttactcggtcgggtatccgctcagccgcgatctttctcaaacctccctcaccaccgggaccgccaccggcagcgtaaccaccaacgtcaccggcggcactcagcggcggtgccactgccaagtgccacagaaaatgaaactcgccgcccaatgataacgatcttcaccatgatctcagttggagtccgcttcacttatctaaaatgacgagcgggcgcacctcattcgatcttctacgggaagcgttcctctccggccgaaacagttagaaggagttctggcagcctcgacagacggagggagttcagcgtcacactcctgactgccatcctgatcgacaggttatcccgatgatctcgagctgcgtctcgaaccccttcagaccaattggagcgccttcttttccgaggggaagatcgttcattctaattgacgctcggcggaagctcgtggaactgttcgctggagatccgagcataaagctcgagaaacgatcggagacacaactcagggcgataggaccaaaccgatatcagccctccattgaacagtaggtcgaccgctacgtgaaacactgttgtttctaaacctttttttgatcattggaggaccaaggacgttgataactacatacatatgcactgcttgattcctttcgatggccatcctgttcaacacgatgtgtgatttccagccttttcgctgtctatcgagttcttctccgcggacatcatgcttcatttacgaccggccaacctggactgagcgaaatccgagaaattctcacttcaccccattccctgactcaatgtagaacatgatccgcagcgtcgtctagagattctcggttcggtcaggatgagcacgtcttagtgcagggaagtcctaacaccggattttatttcgtcttccctcaatacggcgaagtaatcgccgagcggtgctcgtaaaatttgtatgtacgtggtgccttcatttacagaagagaagatagaaagatacttcgtaatcctttcgagcgagaactcgtcttatctgcctaaacgtgaatccgcccgtacaattgaccatttaatggtttcctacttcgtacggagaacaattcctcgtatggaagaaaatccatgcttctgaggaaacgcattttcgtatccacaggggaagctaccccgcgagttctccgttctgagggagagtacgctaatcatggaatgtaactgctgatcagctacttcaacacgagttgagtcatgagtgaagaagaagagtggaggatgatcgctttcgaagatgtctgaaaataggagacgaagacaaaccggaagagtgagttcgcaatagcggatattggatgaagctgagaacgatttccacaggcatgatccggccgtttccatccagaagtagcgagactcttctgtctctggtgtagttcgtggctgactcctcgacgcgacttcacgatgtcacggtatcattcttccgaagtgtgataacaactgtcacaacggtaaacttcccgtgtaaacaaagtaggtcttcctcgcgttgccggctctaccgtgtcgtgtggcagcccgctgggtggtctagtgacggccacgagaactttgttcttttttctgactccacaccatgtttacgctgcgttctcgcggtaataaataaacggaagtatcagccccgtttccggttaagtgattgtcaatgagtctcttgtatcacttgcgaacacaagaaatacgagctcatctacattggagaaactggcgccgtgggtcatacggtgagaatcatcagcgtcgactgatggcctatcctcgaatctcggagtcccttacaccgcgcacaaaaatctctgtcaggtctggaggttccaggtgcctaccttgagtgcctgagtgaagtagcgtacgcggccactatgacgcagattccttctggcattcgcagaagtatcaccggtttttcacgagtaagtgcccactcaggggatgaactgcaaaaacagtggcatattctagggtggtcatgaaattccaggacgggaccttcttgtaaatcatctagtttcccttctgtcacaaaggagaatcagtttcatattgtgtgccaagtttggcatcagtctgtcactaaggctccgctacagttccacatcaaccgactcattaacccccttcaggtcgttcacgcgtgcttccctgtcaagcttcgtctcccagaagcttcccagtttgatcggaacctttctcttggagacccgatccacaacatgccgcaattagggcgcgactcttacaaggaaatggagaagggagagaggtaaggagtcgatgtccttcttcacgaacactcgactgcatgagacggtttcatctcggtcagagagcgaggtgcaacgagaggcggcgttgcgtctgcctcaggtccgtgtcggtgatacccgacatcatgcaggggatatcccgattggactcttggcgttggagtcgatcgcgaaccctaagacggacaggcatacgttcgacatttttgattgatattgatatcgtatccccgcccgcctccacgagcccacgataaagcagcgtatccaacaaccaggcaaaacggaatgtgaacttccagaacggctgctccgatttgaggagggagcgaagagaaagtaaccatccatgaactgaatcaatcatcgtggatcatcatcctttacagaagataaagattaggatgttatcatgggtcgttgtttttattctcgattcgcgaggaaccaccgtcgccccgctgttggacgagtctctcgggtgcgaagaaggcttgcccgggggagatcgtagaagaagattgcctcgaagttctctgatgaatggagctgttcccgtctggccgtttgtgggctgtctaagttgaacttgaaagcgaagatttagctcacgattattaattctgttgttttcagctcaaccattaatctctccgaaagttaagtgtcggcacgtatttgaggaattagttttgcggccggatgactagcgctcagaatgcttggagttttccttcattcggcgaagattggtgctcgcctcactgcaattggctcagcctcaagactgcagcacggagcaacacatcttcgttgagacgacagcaaattcgaaacccggtcacagttgctcggagggcttatgctcgaggtttgtttgaaccagaaactcaacaatggctgcgcggcaggcggccgacaagaaaatatccacaaacccgagctctgcggaaaaagggaaaagtagaatgctaagagatgaacgtagcagattacgcgctgagctcaatccgtcgacagagaaggatatactcgtgaatcatccaaaagctttcaacaacaatgaaataccgaggagttcggagttaaagggggaaactgatgggtcgtgcggcgggtctcacagaaaggaattcgaacgataatctcgtaccgcttccagttcctccacgttccaccatctttctgaatcttggaagcgccattcgttctgaaagccaagaaattcgaagctcgtcgatcacaatgaattctgatcccgaaagttcagctttttttccacacttctatcggctttctgttcctcgcgcgtaaaacgtcattcatcagaaaacgcggtcgtcgattgtggacttagtcgaggttcccgccacatgagttcccgccacatgagttcccgctgaaagctcggtgagccaacgcgaaacctggaaactcgaacaggtgatccccacaagttgtagtccgacgattcccaggaggactcccgacttccagcgcgagaatctcctggtgcaagatcatctcgaaactgggttctcaatccactaagagacgttccgccaaggatcccgatttatcccgagattttcatattccgcaatctctgcagccggagagaagtcaactcgcatcggtctggagattcgctgttcaggtgtgaccgtacttgcgcaggacgactgtctagacacaccgcgtccatattgatcgcctgtctgggagattatccactcccgtgaacgggcggaaacaagctctggacgagcatcgggggatttccgaaaaacgaaggcgtcactgacggagaaggggactggcatcatttttcaagcactagatgatattgtggcaataacagcgaggggaacttccgtcgcctctcgatggcgaagtatacaacaatcagatgagaacagatgatggctcatccaatgctgaagactatgcgacggaagagggcttcaagagcaccgccggtgatagcgacaacaacagccacatacgagagcccatatgtcgagacaaagcgggtgagcgaacaagccactccctgattccgatctgatgaagcgttccgtaaagcccgttggacgctgttggagcggatgccgcataacggacaccctgtataccatgacggtacttttcagaagacggacgcacggaaatcgacgaaagctggctgattggggccggggaacggaacggcctccttcggagtcaaaatccgcagacccctgacaagtcattatcttcattggttgatagcttgtcttctcgacaagtccatgaaaacacttcatttcgaatgtaaactgatcggatcaagtgccaacggaaccttgcgcgcacatgggaacctctcgggaagaatttaatcggttccaaactggatcccgttccatcgttcgttgatggtatccgacgagcgtcataggacacaactcgccgcatcggagagttccgggggctcctgcccaccttcggtaacggacgccgatcctcccctacgttagcgttggcttctgggttagcgacacgttttagaacttcgacctgggactgcggcggggatgtgaagcttgagctttttctcaagataaccataacgcaactggcagccatgagtagtgcatctcggaaatcgcagccgaaagagcctagattccgggcaggaagacatcacgacagaacgagcagcttcacactctttgctcggttcagattgtctcgcatcactctcgtgattacgaattagaagaacccattcaagtggtcacagccgcacttgtgtggtggattccacatcgaatcccacgggatactgcccgagatcgccgttcggaaatttttcagtacaatttttggttcctctcgatgagacccgaggcacaaccaggggctcaccctgtattcggggagcatgacagcaattgaatcctccgagaaacggggctcgaaggagagggcgatgacgatgactatcaatatggagccgctcggcacagacagacgaaaaatttcgggagaacatgttgtcgcgctgactcgcgcaaagcactcgcgtccatttgaggtgattgaatccgagcagtggggagaacagtcgatgaggagttatccagtggaagcgctagaaaacgtttcttccaattccagcggatccccgaagaagggagaacgatgctcggcgaaaggacgatcgcttgacaatgccgaagctcctctatagccttacatacagtcgcgtattgccgtgtaatatgcaaatcgtgacttcgttggggagccgcgctgagaaaaagaagctcatcgaggtataatggtcggtggtcttttgtattcaaagtttcctttctatttctcattccaaataactcttctgagtttttgttcgttccatactccctatcatccgttagcatgcggcgttcatgcattttgtcgttcgtcaacacgccgatgtcgtcggtggactgaacaatgaatcgtatcctggacctacgattttcatcattcacggagaagtagtgacgacaactttgccaacaacggccgtagccgccgatgtttctcatttattcttccctattgcgtttagctgtgtgagcttcggcgttattcgtgatggggctttcgtacgtctccatgaatccgtcgcgattctctacatttgacgagcccagatccctcgtcaagctggtcagccgcaccttttgttgttcttttcgggagagagttgtgaagtcgtagtcggaaatacgccgcggtttttgataaacgacgccgactggatgtaattagtggccagccgtcgtcgcgtcggccacaacaagaagtccatgcgtcgatcggtgaatccatcatctactcgcgatctgcggaatttcattttgtcggcaaccctttcaacgggctgagtccaataccgtagttcgtgtgacgcgcattaacagccacgagctagttccacgtcgtgtaaagtcattgcaaccggagcaagttatttgttcccatgtttgattgatcgaagcagagaatacaatgatcccgtccggagaacttgcattcaaataatttctgtgatattccgaactttagttgatcatcgctccatatggttttctgagcaacggttccagatgagacgctcccttccagtcatcaacatgaaggctattctgttgaaccaccacgaaaactgttcaatcctatgatatctttacacgataacataagcccgctgcaattggacctgtgccctccagtatcttccagtgagcgattccgccggcgacggaaatcggaaacatgcatgattgttgaatcatttcattcgactggacgagcggtgagaaatccgatgagaatgatgaacgtggtcgcgatagaaagaatgcgctgtggagacgatgagctaaaaatagcagagtaggaaaatcatcgatcgctagataattcatgcatccgcgggtgattgtgaccacgttttgattgcagtattctaaatttacttcgatgagaaatcgttcaccggtcaagggccacctttaaatccattagatccgctgatgctagtgatgatggtggcgaaacggcaacgctatccgaagcaatcataacaaaggcagttgccggaaaaggaatgcgtatccctgcagaagaaactgattccgagcgaaagcctggtgagggactcttgtcagggactttgctgacgttaagatgcctactcctctttcattgctgcgacgtgactcctataagctgtcctagcccactgagcaatgccacatgattgcctggagggcgcacaagtacctcgaattgtacttgcgaagtaccgttagcttctttgtcttctccctgaggacaagtctcaggacactgcgcccaggcgtccaagtcagtctgcctcgatttctcgagtccacctcaacgtaaccaaagagccgtcgaaaacaaagtgagtggcactgggggccctagttggaatatttgctcatatttgagaagttaggtctcgaacgatcagaagttggaggccatgtgcgacgcagaagaacgtctccaagcacaccgcaaccctcagcctgtgctgccatctcaaccattacggcacagcgagatacaaggagttcgttgagttgtgatgtttccgacgaggcagcggaatcggatagaattgctccgaaaggcccagagctggctggcggagcggatcgattcagccgtaagaacaacggccccagagaggtgatgtgtcatttgaaagaacatgagaccgggcgcagaattccgttttcccatccggagatagcggtttacggcactccttcttgatgcatgatgcgctttggaggcttcggcacagctcaataaattattccttgttttcgaacatgggctcccgctagctgtgccgacttgaagcagaaccgtgaaaggccacggcggagcagaacacgaatgcaaacaagtggactgcacatccgcgacgtttatctataattagtcgccgcggaggagaagaagaaacgaggacttaccgcgtgtttagtggcgatcatctccgggatctaccgatagaacgatgaaggttaaggccagtgaacaactccggaggaggtaagaacaaaatgcaggatgatctctcagaaactaataagtcacccagccgacgaggaaataacggttaccagagaggcgcgtagctggcgagcgatatagcactggcgcatcttgcggattcatcaatctacctgttcaccagaaactttggctggactgcaacgccgtgggatcgatcgagggatgaagctgacgcaacggaccggatggagagaacgcgcaggcgtatgatgttccttatagctcggttgcctcacatcgccaattttcatgttcgaaaactcgagggttgttcagcctggatcgtccgtccgtctctctgtggcgtaatttacagttcaccaacgcaatcagttcccgctgattgatgtttagaacgatcgaggactagaggaaactccagaaacctggaaatcgggacgctattgacttggtctccattcgaggcgaggagctcagtatggtccagagtcgagctacttcgaaaatcctcgggaatagggaacagatcatccgagacgtaatcctccattctcgaccccattcgccatacagtacaacctcgatttttcaactaattgatgcaaaaaaagttgaaataatcgaaaatttaaataatcgacagatgacgaaatcacccacactcttggactccgcaaccgattcgggaatgagagcccgagttcgaacgctacacgatccagaatgatacgagatatattgacgatggaaaatctgaactatggattcattttccccgtgaaaatacgcttccggtcgacatccttcggcctgttccgcagagttgaaatgatcgaggttatattgcgaaaggttgaaaaaatcaaagctgaaataatcgaggttgtactgtatgccctggatgattcccgtacctaaaccctggctaatttggcggatgtcagacgaaaatccaggaaatttcttcatgaatatctacttccactcttgcgctctcatccagcgcgggtcaggtagcgggtcgattgttccatttctggatgaatcgtcgcgtttccttgttttccgtacggagaccagagaggacctgaaacccctgcactgagcctcaggcgaagtagcgaattcgtcacatccataagagagatcgtgactttgctgccgctgtcgccggtagtgtcaaactgtgggaattccagcattgatcacataaccatcatcgttgtcgggaactttcggatgtgcctcgggcgtcgctatcgttccagcggcagtcggcggggtgctctgcggaaaatgaagatcacgcgatgatgcaaaaatgaaatcgaatgtcctgttcgtttcgcagacgaggcgattctattcgatgccggtctgtgataagtttgcttccaaacaggcttaaatgtcgaggaatgtcgaatagcgtcagctgattccgaagctgacaaaaagtgatggcaagccagcggggaagatccactccgacaatcagtcagtatccgtgagatttcttctaagctgcgaacacgtgactgttgctggtttactgatgtcaacgagcacgtatgtacctttgatcggcgctgtaatttccatcatcggccctactgtcaccggaaataaagacggaatgtttggcatcgagagttttcgcattcaacaaccacagcgggttctttcatcgtcagtactatcggccgtgttgccgaaaagtttgccgtttctgcccaaacaacaagttttctggttcatcgctcactcagtgttggggacggcatgattctagacaagtcgagctggcgcgaactcattgtcggacagtgtggctcactttcgcggaccgggtgcgaaggagctgatcttccggatgctcgcttttgaaactgtcaatattgcagccaagagccggtttgatatttttaaaaccataatttgttcggcatattaacttttttgaaagctggccttgaacctttgcatggacgcgttatcgctcgcctggatccggtggtgaaacaaattatattttcataggttgtgtcaggtgttttatgacaggaagttctcgatcaaccatctcgatccgttcgagtttctaacgcgactccctcatatcggagcggtctgccgtgattgattatctctcccttaccagttaataccaatcatccagttaatacacttaactggatgacccgaatcacggtcagacctcagatcaagctgtaacgtccatcgatacataagaggacaatatgagaggaccgaatcgaagattcgtgacagtcgctcaaaaatgcaagtcaaataaagctctgcggctgggcgcaacatttcactcaactgagtgttgaagttccgtccgagctgttcgccctaatcccctcgggtactttccgcggatcgagatgcctcggcaggtattcgacgacgtggaaggtacagtaacgcgattaaacaaatcgcttcatcgaaaatgggtccgcgtcctgctgtggcatttttcggatccacggggatcacccgccacggaagccgagggaagcaacgagccgggtcaaacttcgaggattccgatcgttcatgttcttggcgaaagctgtagccccagtggcgctttaatcttctgccactcggaaaaccaattcaagtatagaataccgtatgctctccaactggagggcatgctcgtctttctctcattctccgaatggtgcccgttacatggagactaccgttcagccatgggttgctgaaatgggtggcatacccgtccctctcctcaaccctcggagatgcctctccattggagtctttccgtttgtggggaacgcctttcagccagatataatgcggcgaatgaggagcagagtcacaagcggagctgtcttttccctccaaccatattgcttcgaaacgacctatgccatgcatatccgtatgaatgttctctggcgggtacctcacttttgcctcctctgattcgcggaattctcagattctttacccttgcccgtcagctaacaccgttgaacggccgcaaggttgatgcctctcccgtgagctgatcggggattctctccgcgaaagccaagaaggcgggaggacaagctcaagcctaatggggaatagttgagagctgttcgcacggcatcagcccaacgcgttcgaatcgcgaaaccatcagggctgccaggtaaccgaccgatcggtcggtcggtcagaaacgtggacttcgtcatcctgtgaatggctgcgaattcagcgggagaccgacaggaaattccacatcttccctactgagtcgccaatttgctggccgccgaagcgtgtgagagtgtggatttgtccgagctcttgtgcgatgcgaagaccccacggtgaaaggttcgaggcaacgtccagggcggcggcagccacaaaagatgggaggagagtgtccacaaccgagctgatggaatccacgaccgcaagcaaaagtcggcaggtgagatgaacggcaacacgaaaagtcgaatcatgaccgtgcatccaaaatcatgacggcgtttgcgtacggagcggtgaaaacagagaatacgtgaactgaaacgggatgaagctctgctcacgttccccattccagcgttcagcggaacagaacagtttccaactgtgacagcgactgtcacacggaattattgaagcacgattatcactcggggacgaaaccgagaacctttcaatagtcgcgactcggatttttagcgctagaaaaccctcgagtgacaccttctacgcgaaagcgcccgagtcggcgtcacacagcccccgcgatcagcacgagatcacggagacggcatcgaattcgagacagcacgttttttcttgacggtctgagatcgtgtttgtccggatcgacagccgttcctggtacaatggttgctttgttttattaagcaaagctcagtgcattgttcaccggcagaagcgtacagaaaggcggagctttgaagcttcacggaaatccagctcagcagaaggaagagccgctgcatccgttcggcacggatggcattcaaaaaaaagagtccagaaagcgcagaatccgaacagccagacacagcgcgcactacccacattgcatttgttaaagatccgtaatcgacttgaacggacctcgattgatgatcggaaccgcacgtctcgcaaaaaccgggcacctcgacacttcgggaaaaatcggcatccatgaattccggtggacttgattgatcagttcttcttcctatttttcgttgttctgcgctttggaaagtcctcgctttcccctctccgaacctgcgtgtgatctatcacctactgatctcttcctcgatttcccatttgtgaaatgtgctgacatgtatcgtacgaatgattcgcggatgggaaaaccgatcgcgacgggcagaatggatcctcagcatcagaattaccatggtggacgaaacgaggctcagaaagatgatcttctgatggagcatctcttcgagtcgtcaacggagctcactccttgattccccgccgctgcgcgagccgttacgcagtaagtcggtattgggagctcggtcgatttgtcgaggtgagtttcagaaacgggattccccttttggatcccaagcgcgcattaagaggggttcccgttgctgaccatggaatatctgctacaacgtcgaggatcgaggcccctcagagaccccgaaacttgagaactcagtacaccacattcattacgattgaaggaaaggcctgctcgtttcgcgaacttgtcgtccaatgccctcgcgttatagagcctcccttgattcatccgttgtatccataggccatttagaccaaataccatcgctttctatgatagaatggtttgccttccacttttttcggctctccctctcttgtgattatcgctgattagaggggacgcgggaattagatggtttctttcaactcggaggaacgtcgtttcatagctctgcgcctgatcgaatcatcgcagctgaagctaacaagtctgaaggatgccaaatttgccgaagagaccccgcaaggattccaggcctctcccctcgttatcggttccggtagttgcgctgggctcgttcctgcggtgacgaaattctcattgttctccgacgggctaagtcacgttctccactagcgacttcttcccacgtttttttcgcaaaaccactcagctcgctcctgattcggcaatatcaccctgacgcgcgttcatctcatttttcaatatttcctccttacctccgttcgaaacctcaaacgacaggagaatcgatagcggtgacgaatttcacagtccggcgaagcaccctgcatcgtccacagccacatttgccagtttaaagaaatgtaagagcagtcaacaacaaagagaaatcgaaagtggattcgcccaacagtcggtggtctggcgataaaaatcatttgcgatccattcgaaaaaggcgaccatgtagacatttgcttgactggtcgaccgtctagacgagagaccaatcgaccgttcgaccaacaagcggtccggacgatgatctaaattcgtagcgtctgatgtagagatggccgcgtgagcaagtttgcttttctctgttgatctgctctgctcggcattctcccaacatgggaagagaaaattagtttgcccaaaaaagtctctttattaacacaggagcgaggagcgcgtctacgcgatgctgtgcacacgtcgtgaacgttgggcatcgttcgtcagagacgccaggagctcacacaaatggattcgtgtagaaggtaacatccacggaataccaacaccgtgctcagccgaatgacgcagcggggcatcgttgatggttacagtgtcaagaatggaatggtttcctgttccccctctcgattgatctgttgaacttcatgtactctgttgtacagtatgttgtagtgcgagaactaaaaatagaatcgatccatgcatgagcacctgagaagatagtacttatcgaactcatagcgggcgaaaggtgggattgaacgtcgaccttaagtctgattttgcgggggtcagagttcactctggaagcgatggaccgaaatcgagaattcatttatttgccagttttggaacgaatgaaattgcaagaaaagtaattcctgaagcttgctcgcccccaactgtgtcgaatcgagaacctcatttggctttgacgacggagcccactttccgatgccgctcgttgatccgattcaattattccttgtgctagcttttccgatgaaaactttcaccactcctgcatttcacgacatcaccaaatcattgcttccgatgcatccaagtcaccaccaccgtcttgatagctttccagcaacctatgaagtgttacgggagctcagtaattcgttgaaagggatgaaaagctgagcgtatgggaccctggaaaagacgtgcaaaagaggcttcctctgcgttctgatccgtcagccggagctgcgttccaaagcattgcggatgaaattgatcatgaaagatcgttggcttgttcaaaatcatacaaacgacgcagcaccgcaccgtgaaatttggtcaaaaaatccggaagcatccgaagaaagatcgtttctggtttctgcgtcttcgttttacgccggttaattcaagtggaccggctcgaaatgtgagtgcttacacaggaccgcgacgacagctgcgtcgcggaaacagcgggattccggaccgaaacccaagagtcaaatcaaaagccccggatcggagaaagctgggaacgaaagaggaacacgtagacgagactaacgatcctgtgacttccgctgctatttagggacctctggtgcacgccttgaagatggatacctgatcataagctaaaaaggacattgagagccttcgagaacaaactcgaaggatctctttctgtatagcttctgatgaaacaggacttgacttctgagctgcgagtgacgcccaaaaataaaacaggttcacttgaatggtttgcggttcttatgccgactgttaccaggtgccagctggagcggtcaaactcacagaggtcgcaggttcgattctcagacatctgccaaaggttttccagtgatccgagaccatattattttctgcgtctttaattttatcgagcgtggcgaacgcgtcctgtgacgaaaagagttcagctgggtgagaccagagaccaacttctccagagattgttcccatcgctcccactctgttgatgtgtggcctggacctcaccacggtgcatgcagagcctcgcgtatcttcaggagcgctcgaagcagccgggcagtggcattttggggtcccatgagccgggaacttccctctcatgattgttttcacgcccgtcgcgtctgagcacgctagaattagaacctcatcgcagagctattcccgattttctgaggagcataatcaggacttctcgtggcatcctcgaccgccctccgcgaaccgtaccttcatcggatgagacccccgaagcttcaacgttacccaaaaggccgtttgtcattgatccgcacagttgcctgctcagcatttcctccatacttaacccctgagtcgcgcaatggattctcgggtgaggtcaaatagaggtcgcagacggtcggaaagtttgcagggaacgatttgtcatatacaacacagactgtcggacatggaattattcgaagtttctcatgaaataactctcgagacgctggaaaaaatctcctgcgtcgaagttcctcatatgcaaggtttccagtatgaaatttccggacgcctgggattcggtaacaatccatcagaaatgagaactgcgctcctctccataattcaatcaccgttcattcttcgatctattgtatctattttgctctgatagtgtacgtctgaaaaaggttcagtcggccgttgggtaaactgtactcggctcgttacaacggagaaaagtgaaactctttctgctaacaagtgtcattccaacattttacgctcgctccactaggactccaggtcacgaaaactgctattccagcatcctcgctccctcctccattcaattctatcaccgtcagtattcctctcaaatatgatcctgtgtaacaagctcccaatatcataactgtgaacgtacctctcactgcgttcaaccagcgccagtcatcgctacagcaaaactatttccggttaatatatctctgtggaaggttttcttctcgattcggagtcgcgacaaagcataacgattccgcactgagagaatacactcggatacaaaaactggctgatggtgataaagggagagggagacgaatccggaacttcatcgattcctatccgtcaatgctcccaacgaatccttactatactacgggagctttctgtgacatcctcaagccgatcacaacaacattactggtatatttatccctatctcacccgatgtattcaccactgcggcttcactgcatactatcgttcgatgaatacctactaactttctccaggggtttgtagatggccctcagccccagaagtagggatctacgcagacagaccgagtattctgcgaatatcgacaagagtttgaactttcttcatggatctgctccgagagggttccacgcgaggaaaatcaaaacgatcgcatgaaatcgcttttgtgctcctattgtgattcctaaatttcgtatgtgatcgtcgaactctccgtttccggtggcctcattccttccgctgtttgactgaatggccgcagcagatcatcttcaagattgtcactgaccacagatgctcgtcattgtcgacacagtgaggcgcttcgactggctaacagatacagtctgtccattcttctattctcgatattctctttcgcagaaaatagtcgcagattgacgaatagatccgggctgttttttttttccagtttgagccccgccctgacagaagcacgcagggtgcatccttaccctgaaggaaaccttttcagttttccacgtttcccctcgctttcttcttctcacagaaacccgctaatgagcggaagaaaacgagcgcacggctgatcgctcgggcgcgccgagataaaccaggggaacgaactgcgcttgacagacataggcccaaaacggtgattagacaaacaagatggagcggacttctccgcagactacgtcgccggcccaccggggaacggagtcggttggggaacaattctgagcagttctccggctagaacgcttatcttagaatctctcatccgagaaaatttgttactgtgccgcctggctgtatctcattcaagaacaaaacgctcattcattcgttaacttggtgactcgccgacaggaagtaaaacttgacggtgtccattgcttcgcgcgcagggagtggttcttcgattgaccacatttttctgctcgcctaaaaaatccatgagattgatgtcgagcactggccaggcggaccttaagagaccaaactagtttatcggcgaggtacggcatcgtcttagggtggataatccgcttctcggataagcggaggtgatggtccaaacaaagccgcgtttttgcgaatccattcacatccccaaaactctgggataggaacttctgggttgctttaagaagaaacatacacgcttaacgggtgggcatgaccaaggaactggcgaagaatgacgttcgtcatatttgttatcacataagcgtcgcaactctcgcagacgtattgtggtgagaactttcaggaggactttcctccattgatcccttccagctccccgaagtgtcatgaggacatgagatgtcgcctcacagtctcacagtgaggcttttttcgttttgtctttttccaacgccgaaaatatcggagaaaatctcactgcgtccaattctaatggattgaacacgactgatgccctgtggggttcagtgggctgagagatttgttcctcggaaaagattgtttggttcgctccaccgttggagcgatcgcaaagcacatttacatagtttgctattcgatgtcgtgcgcgtattcgcaggctatcactgccctgggttgagcctaagggctgtagccggattctgttccgtccattattggaccccactattggatacccaaggttactatcgcccgatacaacaatacgatgcgacaatacggcatagcctcgtcctctctcgtcggagaaaagaatcaacagcttccaaaatccggctcgggaaatctcgaaattgtcggtttttggtccaccgacggactggatgatctgacgaattctcgaaggaagccctgtcctgtagtacggtaacgtgaactcactgtggaggaatctcagacaggggctcggttcgaatacatttcctttgactccacgtgcttttggcggctttccatgggatgccgatcagagtttcaattcccgactgccggaggaaccattccgttcgtttcattccacgagcgagtgcgttgtaacaataccggctgacgctacgctggttctgactgaataactttcaacgctcctcttcggtaacaaccccgttgacaatgttgttttcgtcagtcgttgccgagtagatttgagtccgccgaccgggccgccggtgaacgaactagttctcgctcgcctcgctttcgcaggtattgtcttgacacggagaacaaccacaacaggaggccgatgaaaacttttgccggatcgcaacagaacattgattgaaggcactttttgtaatcggcgcaagttatcatcatggctctcgtctcagcgatgttctcatcgctcactccgccttcctcgtcctcgtcaatgtggtcctcgccacggcaagagcccaaggtgcctcaggtaggaaacagaaaccgtcttcgtgttttggccctccagaatttccttcgattttgcgtgaaataacattgattgtggagacctgcgacttttcgtggccatgtgccgaccaccgcaggtgtgtgcgtctgtaccattacgtatgcggatacgtatatgcgtacgtgcaccttctcacagtggcggaaggcgacgcgattcaggggtcccactcgaagcgagtatctgtacaagatagtgcggaaacctcgagcggatgtgatggagctcggtgtgcgaatctctgccgacgcagacacacagaaccgactttgcgggtggctagatttaccgagtcacagtgtgctccccaggtggcccccaaatcggcaccctccttcattctaccgcaatcactctctctgtgagtcggagttgagcacggttctgtttcaacccggcctcagacaccagaacgttcgctaaggagaggtgttgttctccgtcggacatgggcagggatagtacgcgacgatgtcgagtcggagcacagtggcgagcaacgtcggaaggttgacgattggaatccgttcatcgtcgaagatcctgagctccttctcgattgcggttcggtctctcccttcgatcgcaaacaggcgttgggagaggatcagcagaggcacggcgatgtcggctcggtcccgatggtgtcgcaccttgaaaaagggaaccaccctcagccatcggagtcgtcttctaggcccccattcctgaagcgctagctccagtcgagaccttccagtctatgtggtggaatgcgcgggctcgacgttccggctcatcggaatcacttaccgcggccacggctacctcggcgtacttttgagcctgtttcacgtcgtcgcatgcattcaagcacgcgatcaccaggcacacagtgacgaacgcgaccggatcttccaggctgtagagcttctctgcaatccggtagcagttcaccagaatacaagacgcgtcctggaactgaccttgtgtcatgagctcatggccatgtctcgcgtccttcgagaacaaaaactcgctgaacacggccgagagtcgaacttccttgttgacataagcatcggacaggaagttcctgcggaggaggaagactcgtacggacggtctgagagagtcggataaatatttcagaattcggtacggattggggctcggaaatgaaactcacgcgaacccgtggcagcgggcctcgatgacctcggtggtgaagtttcccatcagagcttttctcgggaacgggatgttggcaagcagctgaggaaagtcgtgtttcagcgtgctgtacaagtttaggaaatcggaatacctccgttcgatctctccgacttccgaattgtttcgacctaaatgctccggtctgtaaattcgaagagccttagagaagccgagagcgacgaaaacggaggttggaactggcgttgtcgatgtgaaattgccaaatttcaattcgaggttccggtcacgaaacatcagccggaaggcggggcgaattaggttgatgaatcagtgaagatctccgactcacctcttcacagcgagcgtgtatagaacaaacttcttcgtcttctcatcgcatacgatcctggcttccacaacctcgaacagtatattctgctcgccctcgcaccgccgcagctgcccgtcgagcggtgacagagctcgcggctcattggattcggagctcgacagtcgtgttttcgaggaccaaatgcctggaatcaatcctcgttacgaccctccactcaacaacaaagactgcgatcagcctaatcctcctgaccttggaggcgagtccggctacctaggatcgcgatagcggatctgtgtgtcactcattgaactcttggggccgcgatcacttcgggcaacctggcttccactcgaactcggtggcacttcgatatcgaagactttccattcgtcgcggaaggcgagacagccgtggccgtcgagaagagcctgacaagctcgtccataaaccgtcgggcttcggaactcacatggggtatttttaggcaccagtgattcggtcgactctgagaagcggagcgcactagtgccaatagcgagctcgccggattcctctgaaactggcgaactgatgttctgtcgagtttccattgagcagtgttcttctgtttcaggtatcggggcagttttcgaacaacagtttcatagcgcgaagtaagatgcgcgacgtagcactccagccctggctcgtcggggaccagctgtgttttgttgactcggaggtttggagcgaaagaggggccgaggcgcgcatcgccgtccgaggtgggaagtgccggttttcgagccctgttgaactcgaaggcgagataccatttcaaccgactacattccatgagtccgtcgtgaaatattcgttccaaggacacgcaaggataatcgggagcgcttgagcgccgaggtctccggcctgcggccgcccacgtcaaaactcatcccgagatcgccttcgcgcgttggatctcaaatggttctctcgaggtcctctcaatggatgcctcgcactccacgaaacggttggacgttggatcagaacgctacattccatctgatcgatatgattagcagacatcaattgattgcctgtccgccaaacttcggggaggatggtgtccatggtgaccgaggcaacagggccggtccgagccggcggattccggcgtcgaatgtcgttctagtgtccgcgatcggaatccgcactccgttcctgccattcgccgcagagcatggccgacagctcctcggactcttcggagctcagaaactatctgaaagacctgcgctccaggggcggcggccgtgtttcgccttcgcgcattcctcggccagacctgtcgcacgaaacggagccacagtcgagccagaagccagtgacgaacagagccgcggcgctcctcgaccgagtcacgaacttggcccgtcggacagaggtgagaccgaagccggcggaggactctagtccgaccacttcgttgacgataagcagcagtaggaaagaagttgctttcgacctcacgagtgaccggagcggaagactgccgagcaaaatccctcagagccccaaaaccgttcaaaggagaaatgacgcagcctccaagaagtcgccgtcgccgaaacgagtcgttcctgacgtgaatcgccatcaggctcgaagatcgccgagcccatatcacaagaactgccaacactctcatctctccaccccggactcaccggagcccgaacggggcgcatcgccgaaaatgtcgcgatctgtcgtggtgaaatcaaaaccgttgactactcgggtcacgtcggcggggaaccccgagcggccgccggggaggagtgcggacaataccctcaaatcgaaaaccttcgttgccgaggaatcagagggctccgataccaaaatgtcggagacacctgagacaaagacagagacggcagactccccgccgacagcgccgcgagcttccacgagcgagagatctgagagccagggagagccgcggaccgtgggattgacttccagatctgaatcgaggaacccagattccatctcgaagcgcggctctggaaaccagcgaacttcggccgagtacagtgacacctttgaggagacaacttcaaaactgagatcggcggcgtctagacgccagacacgctcgaggagcttggacacgggcctgaggaggagctcgagatccacgaacgcgatgtcgtcaaaatgttcaaaacgcagcaagtcttccactgttcccgattggtggttccctggcatttcggccccaaaacacttgggaggagatcacctcgagcagctccagcaactccacctcggagttctcgacgacctgttcaggttccagatgggactcatcgaaaagcatcaacagaggtcggagaccaggtacaaatggatgaatgagttcgtcaagctcaatcactcctacacttcgtgggaggactaccagaacgacccgcgcgctcgtttcctttcatggcaaaagcatgcggccacagcggacctgcccaactgatagtcttgtggaaaacctccatcgtagaattcgaagcctctacgagtccggatcgcaataaactccattatcgtcacatttgtggacggcttttctggattccggctgatcaaagaaattaatttgttgcacgccgtcgaagaacctgtggtgtttgagtgagtttgagttcaagcaaacagggtccgagttcagaatgatcacgacgaatctctcttacaatcatcgagagacttctggctgtgatcgagtactatcgctgtatctatcaccataagaccggattttctccggagaaacgtacggttttgccgacgaatccggttgcatcgtgatggacccggtcgagagatctgctgcggcgtccgatcggcgagattaggaaccatccccggacccgggaagtgaacgcgctgacaactcgaacaccattcgaatacagtggccgatacccacatgcagcacgaaaaagaacctagcgggacctaaatgagccacgatgcatttcaggtattctgttcaacagagtgtcccatcaagagggctctggccgctacgtgcctggtttcagtcatgaagatcgctcgctttgccgcgagcgcgctctgcagcatgttcccgaaagtgttgaatcgaggttctgcgttgtggacgacgctccctgacgtagccgatttcacttcgggaacgagcttcgtggccgaacttaactccatcggagagaccgatcacagcatcggcttcggcattattgcatagttcgcccagtgcacagaccctccgacaggtatgacagagtctcgtccagaccagggaccaacgtttcttagattttctccaaacgaggatgaccgtttccgaaggacaatgacctgggtaaaaaaacatctctcattccgacgagaaatggggaatcccgttcggtcctgttcctttgaggacaatttttttccatcaacaacaccttcctgaacaacaggacaacttccgttctgggcgatccgcgaggctcctggcggccattgttgtggcagatgttcaggcgggcagcatgtgatcaacgttcagatgcgaatctgttctagctgtggctcatctcttggcgcttcgtaactctattttcattaaacgcagcgaccaaaacggagcggcggtaaagggtgaatcgccgtaaaccctatcatgacacgacattccataagcgtcgaacgtctgattgacgtgacgcgcagcagacgtgcgcggtctccttgtcgtcagtcggaagcttcgtttcgaagcgtgaagcgttagacttctatcggtgaccatctcgaatccctttccgttcaattcaacgacaacgagaggaaaagtccaaatttttgatgtgtgggaacagcgcgaagtttcagacgctgctcggctccgattcggcttggaaattcgcaatcgatgctacggcgctcacgcggcaaaaacccgagagaatcatgttacgtggaagctgtttcgtaaactgttaacgtcatgcatggcatcggagtttttttcttctcgagaaaaataacttcaatgaagttgggagctgcttcacttgagcaaggcaccgttggatttattgcacttttccagactgcgagctcgctcgttcatcgaaccctgacccctcatcgaagttttatcgaactatcgaaaagtttggaaatatgattgactgacgaacacccgtgaaacaatattttgacgccttcgagcgtttctctcaacgtctcccccctaaaagtgaacccgcgtgaccgacaattttcaggtgtgaaggacgatggtgacgatgggtctgacggagtaatcgttgataacgaggttacgtttaaccccttcgcaatctttcacccgatttcggacagtctttatttctgaactttgggaagctccatatccctctccgaggtttgagtcgatttgaccgcttccgcagcgcgacggaacttgcagttccgaattactccgatggtcagcgtctgctccgaggacagagagccgggtccggggaaaagaaggaaaaccagacgcttcctcgttcgaagaggtccaacgaggcggaaagaaacagaatatcgtattacggagaaccctgcgtttcttagaagcccatccagagatagcgaacttgctccctacagctctgaacgaagcaatcaaatgaaaaataaccatcttttccgcaatcgtctttgaacgaggggtcaatcgtagacttttcttagcgactcgctccggtggtcccgccgttctcccgtcgacgtacgttgaccagtgtcgggtttcatttccggagattttacgcaatgcaaggcaaagccgacggacggcggccgaaggcatttccatcattcgttcgattgctcttggcgctgattgaccgagcgattcatctgcagtgattgtttttgtccgcgcgaatcaatcggaacaactgtgaaagaagagcagagtgctcgtattgcgaaggcgcgtccagcccatcggtagctggtctctcacgaaacgagattgtaacaatggagaaaacacttcggaagagatggaacgtgtttacatcctgatttcgccgagttatcacaggtcccaagatggtgaacgactccatcaagaggagactgggaggaaggattcagcatctgtagccgcgatgaagaatgcgaagtcacgggaaggcggcgaactcctagttctcgaaggagccgctgtgcgtgggtccgggttgggcgactcccgattcgggatcctacttcagaatgtttcccacatgcgattgaaaatgcgacaagcggcgctcgaatcgtgatgattgtcggtattccggactgcccggaaaagtatcgaaactctcggatcaatgaagcggagctactctcgcttggcgcaaacagcgagaggtctcgtgccgcgtccgctcggcttattgcagagtcgaaaactcgattcgaccgctcccgactcgttcgtggtggagcactcttgcggaatccgatatttcgaagcattttccgctggccaaaacaggatcgggtgctcctgggagccggggagcgagaattgtgatccattggatctgagctatgaccgtagcaaataagcaacatttaaacagcactagttcgcaaaagagcctggaacgaaaaaaagttggctcgaatcccggcgctagaagttctcacggtgttaccgcatagctgcgaaatgccggcgacgccaacagcatctgacaaagcatcttcgctggagttgtttttgctcatttcgttatatagatctgttgaagtcgatggtcgggaacacaccctcactagaaatactcctgtgaacattcttatgacgccataagtcttcgtcggaacacgatggaaaccaaagcttgtcttgccctgatgagtcttctacctggacaaccagcaatttcgtggtttcgggtggttcgccgcaacgaatcgcaaaacgaatgttcatgtggggtgcgaggcgatccgggtttctccggatcctgcccggatatgacaacttccgattgaaagaagcgagtcagaggaggtggtcggaaatcgaggaacgtggtcaggctcgtagaattccatcgtgacccgacgaggccagcgccgttctctccgttacgtttctctccagtgaaggaggaaatcaacctgatccgatgcggcacgcgtgcgtggctcggcagactccgcgagtaactccgttcgttagcagcagtgggccgactactttaggaattttatgagcgaatggcaactagttgaactttggtcaatccattgaaaggaacaggcggacgacggcttgggcagcacgtcatgggtgaagtcgggaggacgacatcggatgattacagcgaaaagcagcggctctcttccatattgctggggagaaaagatcgcttgcccactttgacatacgtcagagcgatcggcgggccggctggccgatcagctgagcgtcgcacgaatcgattgatcgggtgaatcgtttcctccgaatgccagctatgacgggtgactgtctggaatcgcaagcttggcatcgactggacgcgtcgaccaaacagcaacaacaacaacagccccaggccatgatcgacctcccacgagcgcggttattatccgggccatgggcttcctccagtggttcgctatggagctcgttcgtccacggcaatatctaacaatccgtaattccgtcagcagcgatatcaaatatattgacttcgttcgaattgaaatgatctcgcgctcgagtgtcccgcacctgaactggacatcaagatgtcgctttctgtgactagagccacttccccgtggatttcggtgcgatcacgagcaggttcgttcttggactcccattctgatcatacattgagcatcggcttctcagattcttcctctcctgattgttgaaatccaagatgggtaaatggtacttcaggggtacgcagaaccgcggctgcttcggaggtactctggaacgtaccgggccagtcgaagcggtacgctggcttcggcagtttttaaacaacccatccagaaccggcttggagcatcatgcattgggcagtattgtttcgaaactacgttgaacaatcctttcatgtcgaattcattcgactgcgatgatgacctttgccgaaacaatgggggatatccggcgactgagcggcatcggatttgcttcgatctgagtacacttatcgcgggtcaacatttccgtgtgatttctccatcctgaaacttcaaccgtgccggtgccggatcccgatttgtttcaaaatcttttcggtttcaagctcagtccgcgtccgatgcatcacctcattgcttgatggccctcacgctgtgcaagcgacacacgcagctcccccgcagatagcccccacgggcggctctgtcgccggaagatgaataatgcgcagatccaggacgcggctggccaatcctcgttgattccggggaggagggagaagaaacaacgggaaaaggtctgcaattatcggaactcgaaaactgatagcactggctgttgcggttttttccgtggaattcaatagtttggagacctttcacgagaaggaataatacccgagctcggtcgggtttttctggaaagatcgtgtggctcgggatagaatacgcgatccatcatgtgccgctccggctgaaatctcaagcctccgagaggaactttccgcaaacacgagcccagatggcctaagccagtcacgccctcgaggagcctcgccggagatgatcgctaccaaccgctgctcaacaatatcatgaggtgtgcgattcgcgagcgccacgcaccctgacggcagacgagatggcgccgccagcaagccttccgtctccgccctgccgattctgtagatttccagctataccctggaacactgaacacataatgaatgcgatggagaacgtgtcgttgaggccacgagagccctccgggaagctcagcaggtaaaagggaatgtcacgaggccgatggcccagtacataccgcggggccaagctttggagccttggtgacacttctgatcacggagacaggacagttcggagagctggagccctcgacggaggcgagaggtcatggacggtgcccttcactgctcgcggcgacgagtttttagccgagccgcagaacctctgatctcgccaccccgacggtcgtgagtggatatttcaatgcgagacttgagcagctttttgaggaacgcaccgttggtctaaagcaggttctcgacggttttggttcctgggtagtggacccaaagatcgttcccactctaatcaatcattctggctcgtcactcacagatgtcttcgcggtaaacatgagtagcgacatggtgaatcttctcgggacggctactcgttggaggagggcgacctggccccgcataacggctcgcacaaaacagagatcattgtctcagcggtttacgcacctcggacttggaagtaccgaccatgctcagtcgtatctgtcggcaagctcgaagcctgcaattgaagagcccagttccaaattgtcacagcggatgtgtgtctcgcggaaccaagaaagcacctcgggaagagaacttgaattcggagacattgttgatagtccatgatcaggatcgcactccaatcatcgtctgaggagccagagctggagctggcacgagttctagcttcgtcttgaggaatcagggattcgatttcgcatgcatggatgctctcgagtaattcctgacttcatgagaagtctccggacatcgattagcttctccttcttcaccgggtttagcctcgaatacggcagcactctatcgagtcggaacagattgaaatgattgttccccttcgttttgctcaggttgtaatcccggagagggccactgaatccctgacggcattctgaagtgcccccctccttgactctgataaatttcatccgggagattttcaaatctggttgaggtctcataagagaacgcacagaatctttgaagtgtttgacatgccaatttcgccccaagaccctaatgagtgaaatctacgggtttaacctcacgaatgaaatggaggaaaaatggagatatgccgtttgggaactggcacctagatggagatgtgccgttttgaatctcaacccgattttcgttgggtgaaacaaaatagaaaggagacgaattttggaacattagaggtgcactattgtcccagtatatttccacgttccccgctcccctcccgtacctctgggcctctctcttcaacggatgcctggagtacggcgctataccggacgagtggtggaatgcgacactctcgaacgttcaacgagggggaagaaccgattcttccgccatttcggaggagcagtgcttggaggaaggtacataagaagtgaggcccaaaagatcaggtgtttttccgaagagatccccccacagcaaaggatcaatatcaggcgattgatggaatgacctcaaaaaatcaccccaacctccaggctgattagtagagcctgtaagctcaggtgggtcttcgaaactattccatgagtcgccagagatcgatcgaatacagtaaggggatgatttcgagctataatttggtggctctcaatttgataccagctcgaatgtatggattccaacaggacccctcgcgggaaactgctcgcggacgtgcaagagacagtagtagtccccgagcggcatccttcgacgactcccgagcaccttccaacatggcgccaggaactcaatacttctgtcgtcattggtaaaggaggttctctgttaccctgcaggcaaatctcatggccatcgacgacggcgagaccctaccgcttcccttccaaacaacgggcggcgctcaagacgatgacctcagcccgttttcatctcggtagtgctgaaagatcttctgaagatgatgggaggctggataggcgagcagtgacacactgtagccgcctggcactccagtccgtcaacagatctatgtcggctccaggatggcttccaacggctcttccgttgatgctttcattgacgaccggggcggagaagcaacgatcgcaatgattccaatatataaaaatatatctttctgcacgcgacgaagaagaatcctgaaagaacaaaccgtcgaaatcttactcgaatcgccgaataaggtctcctgtctgaagctggtgactcctgctcgacatgccatgcatacagatgccactatgtggtctgtccgagtagcctaacatccgacggctcgcaatcacatgtgtgtaaatggcacgcattgctggaactgcatttgcagttttactttggttttgaaaccaccagattcccgaatcgtcactgaaagtgagtgaatcaaacagcatcacagaactgaaattcactgaaaccatgagcgaaaggtgtagacttagatgggaggtttgatttattccatctgttgtagtgcaccgaattccgtttttttaccgccgatctgactgtgagtcggtcgagagaagtttctcgctgacagcaagtcctaggtcctccacattggttagggtcggaaaactcatcttggagtcgagcttttctccgagggatcaaaacaactttcgtgtggcggtcagtgacggaatgtgaattgaatacggtttgtttgtgggtggaagtctagcgtgcgacgccgactagttctcatcttctcaagtgtccaagtttttcccgcctgctgtcgatcacggtttcccccacctgccggatacggtcggccagtcgatgagcgacttttttcctatcagcccctccccgtcgttactcccatcgcattcacagtgagactccgatggagtgaccagccggccagaagagcgaacttgaagaaaacaatgagagcaggagcgaatgtctgcccgacctctcaacggagctgttgggagaaccgaatatatacggcattcggttagcatctgccatccattcgagttcgtaactcattcggaattggaatttcgtagaagacagaattttcttcaagaaccaagccacgaacgcacggaactgagcttctcttcgtctttcaggcgcttcccgtgttggctgtctcttcctggagcatggtcgatgcccgtcctttctggtcttttctttgccgatgctctctaggagttccgttgaatggttgctcccttctacgatcactccaagagtcgtctgaaacagtcttcaccacaggagattaacccgggccggggatccgactcttctatagtagtgggcaaccccatcgaggctggcccacttgttccgtcgagaaacagcacggtcatgtttccggaggtcaacaacgaactcctcaaagggtgccgatggaccacccaaataggaatccatcagtgatgcgttccgtcgaattgtaacttgtttctcgagctgttcggtagcattggtatcatagcagtatttcttttgtagccgctagaaccctacacgcgtgtgtagggttttaacgagttgaccatgggtcatgtcctgcagcgtgtcgtgttagagcgcaagttatcgttcgctgagagctgtctgcgaaaaaactgctagaatcggcagtcgatgtacgattgcgacgatctcccccaccacctgaaacggcgatgcgagttgtgatccgtaactcgaaaaaacttcatgagaccttcggagggccgatttcctctcctggagagcgattcacttggtttgtggtctactctgaaataacgacagaaactctgctttgcgtgaatctgtccagttgacgagatctgcctctcactcttgagagcaccgatgtttctctcaatctcatttcaacggcaatgatttcactcaaagctcaaaaatcacccacgtgggaagctttggtcggacgcagcgtcccacgagtattcggtgtcgatgctcatcgaaacgaataggtgggaggacatacgaaacttctccgattctttaggtactccttggaacatttatgaaaacggctctgcgaaaaaaatcttgaccttgttgaaaccgtcgcgtcggcgattcaactctgacagaatcttgtcgtggtcgtttgttcgtaactttttgctggtgggattcgagttgtgttatccgaggctcgtgaactttttctgtacattcgttttctgagtttctgtcgattgaagggaaagcgcgcgcagtgaaactgaagagcaacgctgggatgaagggtcaatccaagcaaacgataatgtcaaactgttcgcgaagtacaatcggtgaagatgtaaggtatggtatcggagccctgcgagaagaacactgtgtgaaggctggagcgaagaagctcgtctttgcaggaaaatcgcacttgagtttttcgccgctggaggtgtcattttcgcgcctcccttccttcagagcattccaaaatggtggaatcaatcccagacttctataagataagacgggtccatatgagactgaactgaaaggtacagtgtccccgatgtcctcgtcgaaccggcactcatatgacatggcgtgattaacaacatcccaaacgaaattccctgggatacgctcgtcaacgagatcaacacggtttatcgttttattgtctcgatatttcaaagaaccccagaccattcttcctcttatcttagagcagagccttgttcttgaagcgtttcgtgtcacgcgaaaagtgccatgattggaatggtggctaatgctggacgtagttatggtataacgaggagaaagcccccaactcggaaactcctgcgaacatccgcatcgatcgtggatccggataagccaggaaggattcgtccctgggaacacttctcacttttggtgccgagcggtccgagcgctgcgtgaaaaaactcactcgctggactcacaagggtcgaaaatttccgagagctcttgtcggccaccacgcggtgtaggggcaccaaacttctgcagaatcactgcccgaagaaactccgaagcctcgaaacgtcttttttccttgttcctcagtgactgatcaaccatacggatgatgggagtgaagaagaagtggaataatgattggagagatatcgtttcggagcctacgatgcttcccaagttcaaaagttctcaagttgcccgaatcgatcgagagctcaaggcgagagcaggaatcagatttggctgatgtagcggtccgctatgttctgaaaagatacttctacatcggtcaacagcttcgatgttttctccttttcttttgtcagggccaggtgagcacgagatggcagtttgtgatagaagtacctaacgacgttaccgaaaatttctgtagtcaccagctcctgatcggagcatacaaggcctcaacttcgaccgaaagcgaaagttggccgccatcacgagcagcgtcagaatgtcgaagtcgcgtttttctttcttccattgagacgatcgtaaaaatgtttgagtgatcacactgtgattacgtgataaaaagaggagcgaaattttcgtggatcatctccgctttcgaaggtacaatgagctatccggtggactattgcttcttgatctcggtttaagtctgtgacccaggctccatcttcatgaaggtcaattagacaaatattgcctcgagacactcacaaagctcatttcggaaatgacgtgtttctgagctttgctgcgacttaccaagtagctaaggcgccgctcccgccaatgcatgcgctgacagtttgctgttggacgcaggccagcttattgtgcctcgagcctcttttcctatgatatgtgaatcacgcttgagcgtcgtgcaatacgtgtgtcataagtccgctattcgaaaggcaagtgcaaagcctttgcatgcgattcgtgtggcttactgaacgcgttggtgaaagtcggagaaataaatcttctcaaccccgaacaaagtgctctcgaacacttgcttgtgagcacgtccgtcgcagtgtctgattcgttgggattgagaggtctcttcccgagatggaacgatttttgatgatgagcgatgatcttaagcattgtaggcaccagttagcagctgcaaatatcttggtaaaggagatgagcttgggtcggagacaaagcctcgccgagagagggaagaacgacgagttccctacgaagagcgatcttggaaacgacagattttttatttcaaagaacatgcgtgagccgaattcgaacgatttgcatgccatctgaatgaacgagcatccaccacactttaaatgaatgggtttcagccggctacgcagcttttttgctcaacttttcgatcgtcacatctgatttgctgagtccggacttttttgctgctttccgcagagctgctgcgggcgctccagttggtgccctcattgtataatatggatagtaataatgaggatagtaatagcttggatagtaatatccacttgtatgaggatagtagtatcctgccgttccataataatagggatagccgtaaccgtagctgtaacctccccaaccccaaggtgaatagagtgaagccaaacctaggagtcccaatccgcccagaaaccagcgtttctgtcgggactttggagtgttgtcagagttcagactcgagggatttgtgctcagtgtcggatccgctgacagagatgggaaagttgagattagatgatagaacagagagatgggaaagatcaaagttctccgagtatggagtgtcggatatggtgacgctctgaatgtctaggagcatgaagacgtgtccctcaagctccctcagatggagagatctgcgaggatttccgctccgacgattcccatagagcttgaatccactgtctgcggttggcatgaagcaatatggagattttcgggatgtattcttgttcgtacatctctcagagttttctaccttctgcttctcctgcttgtcttcttgaacgaatgaaaattgagcgttttgcttcatgcttcatccctccggcacccatcgaggcttcttctccgctgcttgctgacatgtcttcctccgagctcacggatttgttctgatgttcctgtttccggacttttctcgagagctgcagaagatattatcatgcatctttcattgtttccacttgaagggtatgaaccactgacgattcgagcccattctgcaggacagccacgcacagagttctggtgggcttttctcacgcgactccccgctgagatgtgaaaaaagctattccacaacgcgaattttttttctctcccaaactcaccttgtccaaagcgattgaaattactcgaagcgactgcagggttagttggtgctccacgaccatcagtttcacgacggcagacagatccttgagcgcttcgtccactggtattttgtcgactcggatcatggatccaatctgcttgtcgtcgagcataggatcttgcaatgctttcgaaagcttcgagagttctttcaagccatcgtctatagagctcgcgcctgctggagcaattattaattcgtgagagttagtcggtgccgttgatccacgtgggttagttttgcgggaatttacaggaagcgattccaaaaaccatatcgagtgaggtcctgttttattctaggacagatcatgtgccctcactttccactcgtgattctcttttatatgcaaaactgtgtcggcaagaagacggaagaggcggaattttccgtttagcacaactggaatcacatgcgaaactgaatgaggtatcagttatcggcccaagggcccgaaaccaccaattaagtttttttctggagttcagtcacagctgctctctgagcgtgctggctcccaaggacagctttgtgtgacatctcgttagttggatcgttgagtaaatattcgggttcagccagcagccgaccgcttctcactgaagccctcggaattgagccgttctcttctctcgcggcagatctaccggtccctgggaggacagcgctatcgaaacatttaaaactcgcgaaacatttaacggaatccgcgaaagtcggtggagagcgacggatttccggtctaagataccccagcatcttgaatttagatctctgaataaatctctatgcagtcccgcattcgggaactcgtgcctcgaactgtgtacatgcacgacccttgtagtatagaatctatatcatgagccgtcggttagcgacgaggcctcctctcgattatccgtgcgacagagtacgagtcatcagaggttcgtcctcgatagcgtcatcgtcatcatcgtcaatagggtatttgatagtgggtagccctagtttctgaacgggtggagtgagcgtcgtggttcgaaactcgtcgtaatgaagctgtttgtgattcctgtgcgtaggttttgaggtcgtatcgaaccgagttctctctgtggttcgcctccctactccaaaagtgccgaaaagacctggtctcctagtcgtgctcgtcgtcgaggtcgttgttgtagtcgtagtggttgttgatgttgtggggaaatccgccctggagtccatcatctgtagaatgttcgcaggatgcagaacattgggaatgaatccaatgtgcgtggggatgagctgaactagagtgccgttccggaggactgtgaggggatatcgggtgaggttctgaatcctgtctagaacctgctggtaccacggttgcgggggtgggggggagatgagacccagcgtttgcatgacaggattcaggatattctgcatgaagggaggcatgatttggatggtgctggctactatcgagggcctgcgggtcgtcgttgtgggtatcaacgtgctcaggattccttgaccagctgatatggaatgaaaatttcgtcacgaacggagcgatagagtgaatgctaatgtggtagtatcaatgccccgagttggaggtacttgaatggcgtggcaagcggtatcggagtgagaagtatggcgaggagctggctcctctccatacttctcactgcaaacggtttcgactaccgaacttgggttcaatgaaaactgtagaatgtagaatgaaggagagacgcgtgcaactcgctcgacgaaaaacgagcatgttcgcacaatcattgcaccgatctcacgagagagcttatcacaaacgagtcctgagttctcacaagccaggctatcctgctggaggagtctccaggggcgagcaagtgcaaaggtttgccttagaaagttccgcgtgccaatggtaaccctcatggagcgattcagttcccgagagttctccggcaatcgttctttacactgggatggaacgacgagctaccccgaccgccaactattatcggcgtggggggaatttcgcggcgaactcaactcacggaattcagttcatagaactctctccgtagctctacccttctaccccttccgacgaagctacatctcgggttgacgaattcgtcgtgcgttcggattaaaactcggagagcggtcctgttgagcagcttcgaagttctaaaggatactcaccagcttgactgagaaccaggacagagaaacttagtccgaaaacgattgtgcgtgacattttgcttcacgttcggaactgttttcgagacgactccgtttgaggattaatatagccctcgcctaccactcggtcctttttgtgtgtgagtaagtgagttagtgtccctcaaactaaatttattccaagcaaataattgtgtgttcgaatttgatccgtcaccattgaaagagggtgaatcggaaagagttacacaactagaaaatggtatcgaaacccggcgcttgctgagatcgctatctgactcggcgcatcggtgtccagtcaaggttctggagttcctttcattttagatttctgaacagaccgtcgactcgtccaacgtccgctgggaaaaaatcctctgaaagcgctagactttgcaaaactgcgctcaaaactggcgcgattcacgccggatacaactgatatcttctgagtgtgcgaaaaaattgatgcagctctatcaggcggaataaggagatcacagcggatagttcccctcggaggcggagcagaccgcacgtaccgtccaaatgtggggcattcgagtcactgaaggaaaaactctgacgatgaccttctccctagaacaatggacaggtaaacatcacaccggatcgcggcgctgagtggactccggattctaggaatccatcccaaggacgagtccgacaaggacgcccgttatctgggtcatttgagaacgaactctaacttggattatattgtaattgatggaaacgggtcgattcccacaatcaaacaagaagccgaagcgatgccgcacttttaacccgacggagcgtggatggaattcgtgcgcagcctgcaactggaccgcgaaagtggttcgccagttgaaacaacgactcggccgaggagatcggcattatgtaggagatcaacaccgttcgcgtattattccctgagagagcaattattgctcacgcgtgttcgtgccttgcagagaatccaatgacagagattaagccatgaagtgtgattccatctgtgatatcatgtggttgtccccttcggaagctacctcctcaaaacggcgtccgccaaccgactcaatggtctgaaggaaaacccgcgaaactttcttttttcaacagcgagttactgcaacgagctcctgccctcgacggagctcacagttctctaaacaaaagccgcgctcagacatgaactcactggaattctctgaatgagtcaatcgcttttggcatttcacgcattcccggaccgagctgcgaaattgaaaataatgcaaaatttcatcatttgttgttcatctcgaacaacgtgttcagaaaagtcgttggcattcgatcgaaacgggagcacaccgaatagctgtcagcgtccgaaattcaaaggccgtcggggataccccgctgtcattgcctgtttcacgacataggtgttgagctcgggtttcacggagccgtcatgtctcccatatgccattcacagaagtgcactgatggcctgcctgagtgcaggggtcgatgcgaacagaaggtttactggagtcgatgtttatgatagctcttccctaatcgataagatttaaatagattcactcttcaaccaaacgagacatttcgatttcttcccctctgaattcttatgaaggaaccaatcagtcgatcgctcgctcgctcgccctcagaacgtggtaggtatgatggtgtgggaacattcctgaaaagtgacacaggcccaaggtggggcgagaacagattgagtcagaatcgagcacatggcatcaccgctccatttcggtcggccccacacagggttagctcaaattacctggagcactgcccctcttgaataactgaccgtaggaggtctcctgatgacgttctgttgcctcggcgccttcagctgaaggaccgccggttcgctcgtttgctgtttcgtcagtggcttcgatccgagtggccgatgctgcttaggggtcggctttctccaatagctcccgcaagaaaaacctcatttagcaaaatgggggcaggaaactgagcaggcgagacaacgagggtcttgacgagacggggcgggagaggatgttgcaccacccgactccagtgtttcgcccaaactgaacgctctaaaggtacaagaatgaccaatcgccaagtcaacgaacataatttcccttcaccttcttcccatttcaaagttgattccacaaacgaccgtatctgtacgagaatgacaatgaccgaggagctgagagagagaaggaaacgcattatgattataataaacggaacgacaaccgaatgttacgttaatagtcctgttcaggccggcaacagagaggtcataactcagagcggccagtatcggtgatattggatgccgttgttcgaacgagaaaggaaaacgaagagagccgatggaaggaacaaattactttctggatattctgttagagccaaaggccaaggccggcaaggtccgttggcacgatgaacaaattcgatctggaacaacgagacatcatttgtttcattcattgttctcattcccgtcgcgctcgcatccccgctgacgggatctggtggtcaggcggatccgacgagcgtttgaactactgtcgatctttcgatttcgagtcggtttcgacatcctcacgactcacagccaaggcggagaaaggcaaacgcatctcattctccgggcgcacccatcatgtgacccctttcaaaaaccgacactgcagatatactttctatctttgaatcgatgttatttatccgacggaatagagtgaatcctattgaagtggtgtagtgtggcaaggtgacatttacaaatcacgcaaccggctccgttgacagctgggtgccaagttcgcaaaacatttgtagatacttttttaatacaaccgaaccacggggcatcatacgtgggcccaacaacagcaccctcaacaatggcattgttaactgtttctcggccacgcgtctcggatttcccgacatgccaccgatgatgcaatcgccgctcgggcaatggtcaaatatttcgttgaaatttccggttggaccggagattttgtcattttcttcacccgtttttcctttctctgggagctcggggtgcggttctcctcctgctttttttctcgactctctactggccgttcggtgctcgtcccgacaagttgctcagcgcaggcaattctagaattgacaaattcacaataaggacctgttgtcacatggctcgcttatgtaagaaaatagcaaaaacgtttgacacgtctcttgggcatcgagccatgatttttgtgcagcggtcgctttgtgtttcggtcaggcgcccccaccctcatttttttcggagccgatggactggaagatgatgaaacgcgcgactcagagctcggtgtacagttctcccgagtccaaacgctctcccatcttacaacgcaaagcaatccgaatcgtacgaaactatccacaatgtccggagaagttgatcgcccctgtactctttatcaagctcggcgcgtttgaatgaagaccgtattcttcgacatcctcttacgaaacgtgcggttccgagtaaggcaggaagacgtccgtcctcgtgtgcgcatcttctgttcgttggctaacggtcgaaggtgagcggctccaggagacgtttgccaacaggatgaaacagtatgtcttcgttttaccgatgccgctgacggcaccgaaacaaaaacgagtcacaacggtgactaccgctcacgtaaaccccttccagccaagcatttcatccaacgcaatcctgaactcgtattcttcatcgtcttggcttactgtgaacgatgagagatatcagaggctcgatcaggaacactcagttttggcatcggaacggtttcgcacgtggagaacaggaatcgacggacgtgatcaactgggaattgcttcccacgggagcgtgcatgagatcaggatgcccgagcagccacgcgagtcgtcggagtcgcatcaatcccggattctcgagccggagatgcgtctttagtgagcatcgtcgttgctgcattctcaaggtaactcgagggaattcatagcgaacgcactccggtctctcaacggaagccgaagcccatcttacggactttattccccaactacatcatcctcgcctgttgcgatgtctcaaggctggcgaagttttcttttcgtgagacttgagataaatacacaggctcggatggaagcgaatgccacttttttggacacccacgcgtgggaaggagcatggtcaacgagtagcgcgtattgccatcactaagagatacatgatcacacgaatcaagcttcaccttatgatgacagaagataaatctgaattattacgttcatagcttctttccggtcgctccgcatatcgcttcaaggacgagcttggaggtcactccgaacaccggatcacccagggagcccgttggttatctttgagcaggtttcgtctcactcttacggatcgggctccaagattttctgacgataggaatccaattagaataataagttaaacagaaatcgaaaaagcggttcatcgcttccgtttgactgcgtatgcatggcttcagccgagctcccagcggaggtcagccggagtcacgtcgacccctcacgacgtaatcattgaaactgaaactttggaccgacttcaagtagttaacagaaccagagcagaagatctcggtggaatagcaatctgttccaaacgtttccgatggcacgtgggattccgatgcgttcgaggaaaaataatcaaaactctgccgaacttcgtgatgggaaactgctccgaatcagttcgtagaaccagcgtgtacgaactggtcttcgaggtcgacaagaagctacaccagaagcattaaagctgaccgaagttgattcctggagacaccgatttcggacgatcaggaaggagttcttccgatgcatcggatgagaaaccaagtcgaaggatgtctcggttcatgatgggaaaaacgaatgaaattcatcgagcgtttttcgaggcgtgttcgaggtactcttgatcttgggcttattctcgaatcttcgtccgaaaaaaagtacagcgaccgcccagaatatcgggttctgtggggatacccttccggatttgtgttcaaagcccacttcatactttgtagcattcgaattcgtagatctcaacagcaggttgactcctcgagaaaatggcgacagtctgagagaaggtccgcacgcgcacgcgagagtgtatctcttatggctatatttacctacgacgcgagtctcgggttcggccttgcactgccgcatttcatagagggctcatttgttttgtgttactccgaagagtcttcagtgccccaagaccggcaacggctacgagctctcaggataatggtccttgctaacatatgacgtagataatgagcctctggatactgctctcggaaatgccatcatctgttcccggagtttcgattccgagggatcgataagtgaaaatgggagacaacatcgcgcttccacaagaattctccgagtgtgtagaaagtgacaaaaaacgtgtcttacgggacgagtagttgcccgcgtcgcatatcgaagagctcgcgttaagtgagaaagagcactatcaaggatcgcaacgggaatcccatgcatttgattgggaagcgttttcagaaagtcgaagacattgcagtcttccccgaagaatcacatcgggcttaatcgatttcgcaaacttgattccacgaagctccgcgttcagcggggggagttacgtcgggcgacggaaaatcgttcatacaattcgtttctgtacaccgggtaacttcgggacgataactccgtggtaccggagctgttctcgaggagcgtcatatgtggctgtgagggacacgaagaagtccggttgtgttcgcatctcgattgttcgcagttgggtgcataaaacggtccaacggattattctgtaatgacgataacggcctggccataatgcttcgaagtcgcactaaaatcatatcaggttcccgctcccaatctgagcactcgagaaatcgcattcgctcaatgtcatcgtcattaacgagcaatgacgagtgttctttctagccttgttgcttctgcggacgctgagaggatgaacttgttcggtaactttctcttttgcctggatagcaaccagcgaccagagcgaatcggagacggggcctgcgacggcggtcaggccgctatgcgcccgtcagatctaattccgcccgtttcctagaaacctacatccagcgagatctacatagagctctacgccggacgcatacaaagtgcgcactccaggtgactccatggttcgcgagaggtcgtggacagagcgggatgatggagtatatctcgcgggtatctagtatcgggggccgaagaatctttgaagtgctggagcgagcggaacacaacgggttcgaattgcatgcgaacacagctgaccaatcatgaggaaaacgttttatttgcggaacgttcagatgatcgatgtatgagatcgatcaagatttgcagcagattgattcaatccatcaggtgcctgagtgggatcgataaagtccatagaccacgagccttgctcggaaacgcgtaagtttgctcgaagttcccttcctcgataccagacggggtattgccgatgagcatttgacccggcagtcaagcatcgcggttggtgctcacaaaggcttgtcgtcgtcgtgtttgcagtgatgaccgagaagtcgacgttcacattctggaataataacaaagctcagtttttattcctgaatcgtgcacgaacgatgcataaaacgacgtcaccccctacgacgtgttgtcgccaccacgactaccgcctctgtcatgtttgcattatggactacgaaatgtgtacggaccccggactggaatgcgcaatcaatcgattgatggaccagcaaagcgagcaaacgaccgtcgacgcgagagtgagagggagagatgacggtatcgatgaatcgatggtaaccgatgaaaatttcaacttcgaaccctacacaaaagatgtgggcgttcgaaaaattgcacgaggtcgcatccgagggtcatgtccaaatcctcgaaacggaaattgttcattgtatgttcagaccgcagaggcacacgtaggggaagatgacacgcgctggcatggagtgttcgctcgaatgttgtaataacaatacgatgatgattgtgaccgcttattcatgaaggatcgccgccgtaaccaccgaggcagccgccacgacgggcaacattgccgctgcgggaactagcgcgaccgacggaccactgttgaccgttttgttgagcagccggggctcttgacagaagctaaaaacttcggaacagtcgagagggaaaagaatcatgcgacgggaaacattccgtcgcatcccacagggcaactacacgcgtgtgtgtgtgaaattcgaagatggaggcaactgcgatcaatcccatcatcaaacgttgacgtctcttctaggaaactgtctcggactttccgggtttctcacacgaatataaaaatctctgttcaggcttcggaatatccgcgttctgtactgagtccttgaagctatgggtcgaaaactgtcttccgcgaagacttagaagagtatacttgttgcataaatgaatatcctcgtaaacccacaacgaagagtcttccgtttcacgagattgctcacgaagggaactctcgagaaaacaggactgccttatgaggagctcatcacttccagattcagagaatatcttgatcccaatatgtgactgagatcatcacaccgcattcgatgtatgattccgtgagtggcttcccttctgctcatacattctaatgttttcccagggcaatgtttcctctccgatgtgtttagcattttttgagaatacgaaccaaaccaaactcgttccacaccattcaccagacctccagggaagatagatcgtggctatcgacggaacatcctcccaggatcagtttttgatgatcgcacccatgtgcaccgaatccgaccgcatttctcttttttcccaaagtctgtgtgatatccgcattgctcggagaggttcctgcagtggagggcacaatggagacgaattcggtgaagccttctcgtgaacttgagtcggtccagtttgaagatgacacgggatcgacaaaatactacagggaaaaattatgaataagcccctcatcaatccgaatggctcttcgttggcagctctccacaagcgtcatcatcgccatcatcaacagtcgagtaggcacgccggtagaagcaacaggagtggtggtgtcgaatgattgacaacagtcaataaaacgtttgcttcgactagcggaagcaagcgatgccgcaggcacagagctctctttcccgtgatcgttgaactcgactatcgctccggaagatacggattccgtgaacagcgatatttgcttttcctgacgggcacaatgttcgatgacgcccaagcagccaaaaaaagtcttagaatcgtggattcgtttgtattcgccatcctattcctgggtcagacccctacacggagaagggtgccccacagaacctcgttgactgtcttctttttgaaaatttccgaaaaagtctgactagtgatacaggaagccggaggtcgatcggggctcccaattccatgatccgctcatcggagaagttgctcattgaatgtgatgtttttcaatttcgtttccagacattctacgcgtttcagcgtaggactgcgatcttgtacaatcatacggtcgggggaagcaaaacggattgcgcagcaatttagatatgcagacgtcacacgacgaagacggacatgacccttcaacactgggcggcgattgaccaatgatttctaaacgattccgggcttggctttttttgcataaaatatgattatcttctcgagagaatgatgatacctatcttctgcggtctaaacaacctcgggagagctccagatattcggatacggaatacatcgtcggtgaacccgcgattccccctcggccgtggttttacaaaatcatcgcatttcgagaggcagaaagcttggcggaccatctccttccacccctcagaaatcgtcttcaagatgggaaggatcgtaggaataacgaggggaacgaactctcggacaaaacatcccccgcgttaaatgacggctggttctgtgaagaccgtggtcgtagtcacaagacttcgatcggactgctagggaatccagatgaataatctccctgggacgatttttgtgcgctgcgcaacattccagccggctggtgaaactgtcaaaatggcctgggatgtacatccctgtttcctcttttcgagccgacagctatttcgacaaacattttgcttcgcggtcctgcttggaagctgtgacggatcagagctcgttcgctcctcgttcttggcgtcggacctcactgaaggtttcgcttggccattccgagaaatccactagaggcacgtatgccaaggccgaagaatcttccgagatagattccccatttcccaagaaggaagggaaccatggtcgccgttcctgaagcggaggtggggagaagcgatagcctgccggtatctacttatcgtccacttgttgggctcccgctcgagggggagccgttgagtgagtgcgaatctggagatgtggcacaaacagcgcgagccattcggacctaccgtgatccatgctggagtggtaaaagagcacaaggggaatttcaacccggattttcgattcgttaaaacgctgtgtggggatgacgatgaggttcgagtagtccaacgagcattgagtcttccggggcgctctcgtgacggatttttgtattatgttgtcaagaaagttcgtgcggttctctgccctgaactcagcgccataacaaatgcccctcactttcgttttattttcgataaaattgaatgatacgcgagcgatcggagctggcaaaatcggttcggaatcgattgtaacgcggagagtacgggaggggtgcatacagcgctcgatcgcacgaggctgtaggatgtgtgatcaagccagtaacggttggcagagggagagctaaggccggagcaactctcgttagcaggccccaaagagtagcaaaacactcgagctctatcctttcccacttcacgacctacagcaacgtctcaagcgttccgataagtgtgacttgccgataaggagacaacatgatggccggcgatgcaagagattgttgcccgcagctatgagaagtccttggacttcatggggtgaagcaggaggcgagcggttgcgactctcgagccaaggtcagcttgcaagctcgggaaccctcaagggacggcaggcttacagacaccggctgcttcaggccgacagagaagcaggcggacggccttcgaacaccagccgtcggctcgagtcgggaagcaaaagctctccaggcgatacgaaatatccgctctcctggcgtacaaatagaccgtgtgtgtctgggaattccagcgtatctgttaaactacactaccagcgcttctgtcgcgagtgatagtctgtcttcccacaaaaagactcgtttgcaatcgttatcaccttcaggccgacccgagctgactcgacaacaacaacgacaatcagaatgcttcagatgatgattgtgatgaatagcgccgatggcatttatgactgaggtggaacacttgcgcccaacctgagagaaatgcggccgtcctcgagaatcgttcggatcaagccgcgagcttgaatcctggtagccgaagctgatgttagttgttttgattttgaggaaaatccacctctggttggttcatctggtgattgaggaggatctcggtgtttacggactcagagcccgagctcagagtagagacagcttcatttcctaatacctactctcccgttatcccctacttttcgctcgaattcccgcgtgaagctcagcctcaaccttgataaatcatcagttcccacctatcaaaatcaacacaagctggctattcgcggcttgtcccagttcagtattcacgcatactctcgggagtttcgacccagggacctggtgcccgaatcagttctgttgtgtcgcgcatctagccggcggggcaagcagacgagcatccatgcaggccggtcagccggtagctcggaaacgaacccgcgagcctgataggacggtagtccggatgatattttgagagtctggtgagcgaagcctacgattgcattccgggttgttggttcgaaaggcgtgccatgatatcgaagtgcttcgttctgtcttcgcggtgtcgctccacatgcggacagatttccgcgagagccgacgacgaccgtttcatggtgctacatgcgtacttcgcgacctgaaatggcaagaaacggccgagtaagcggcgcagtccattagaagctcttccagcgaacggagcacttagcgagtcgatgaatcgataaatgactaatgctggtctctgacggctgtccggggatgcggctacgtgcattcacgtacaagtttgcggcatcttcagatgatgttagcaagcgtaagataaactgcttgaagccagtgaaatgtccccatgcgccactgcgcaccgaatcaggctcgcttcgctaattctaattgctcaccgcgcgagcaaaactcgcaccagcgatatttatttatagcttgctctagagcatcgggctcttcgccggagacaaacacagaggaagttcgggagggagtgaggaaaggccaagcgacaacgatagacccggagagagcaaacgagcgcgagagccgctcgtagagctagctgcgatctcagccctggacagatgcctacaggtggcggtggtggtgtcggcagcctgtggaaataagccggctccgacccgatttcgaatcgaaacaatgcgagctctacggaaaatgtcccggaaccgatgttcgcgcgaagcgttttctgtcggggttcctgtcatgggcctcgataccgtcatctctgccgctgcggcctggcggtgaagcccacgcgtgtagtcgacgacaacgaacatatgattcgcttcagtctaaatttagcacagactgcttttcaatgctggctcgcgccttttctctgcgctggacgtgctcattatcatattctgatgataccgcgtgcttgtcgcgatgctttacgaacgatctgccccatcttcgggaagacgtctaccgttatttctctccaagttcctcggtgctcatcgacatcccgccgcctcagatcgcggggagaatcgataccgatactttcagctgttcaggctcattcccccgaagttagggacgtgaacgtcaaggagatcactcgcgagcctccctcgactgacgcgcgaggagacgtcaagccaatgttaagccgttgcttaagtattgacagacagtatcggtagttgtcgatttgattcgtgaagagacgcaacgcagaaatcgattctgggcctgggatccttcttgcggttcttcgacgatcatgatagaactgagggtccagcacttcgagcattgtcccatactgctcagatttcttgaatgtcaaacggttatttgtagcgaacttgtgttaaacagaaacagattagaattcatgagattcgcttgtcgcaagtggattgcagctgtcgtttaggttagtgggtccagacagaacaattgtatatcacggtcgtctgtgcgtttctgcgcgagagtgtgctagtatagcgatctggtcgcttgctttcggcctcagcctcctcgcagatcattgttctggcttcttgcagcgcagcccagcttagagaactgctgtctcttcgctccgcgacacgaaccagagtcagccgccgccgttctggccaagggcttggcgagcggaggagagacacaaaaaaaagagaagcttgagatcgcgacaggtatcgcactgatgaagagcttcggaaatcgctagccggcaaaatccgcgtgatcgtttcaccgttcctcaaaccgggggtgtgccaggatcgaagttccacaattcctgaggagatactaactactcgcacacgttcggggcattctatccctaccgcctggtcaggatttttgcgctcgaaatcggtatcctataatttccctctagcgcttgttctcagagggctctggaatcccatcgaaaaatcgtggaatcatttttgcgggcaacgttgaccacatgggcctcctccgatgctcatcagctcatagaattgaggacaccccagatgcaggatgtgtgcgacccacgacattgtgggttcccctggaaatgacgcgctgaagaaaaggaaaacgtcctgaatgagtctcccaggattccaagaagacacaggcttagcgatggcccgaaaaagctattagtcccgttactcgacttcggaggatcgggaataacatctgatcgattcctaaattcccagcgccgaacatggtttccaatggtggggatgaagacgttctcactgtgaatagttccatgatgggaaatgagccaggttgacgctgcgtcaaatcccacagtcttccgatcgaacaggttctcaagaaggggcttcgtgccgatctctgaaactgcgcagttcgcaacatacgggcgagggctatcgtaagttctttgggtgccgagagtggtaatccacgataatccgtttccagagaagcatcgtcgacaggatatcgtcgatgtttgtcaatgagtgattcaacgttccgcaaagccgggctgcggctaccggtcgctgctagggaagccttgtcaagttccgcaatcattcaggggataccaagtttgtgaagatcggtcgaagcgaatccgtagcgcaagatgttcgctccatctctggtgagaagcggacggacctcagctttctgcagagcaacgattcgtctttttcctcacgtacccgagaggtttacatcccgagccgcgccctccatcaatgctccgatcggcttctacccgaacctcatatcatttctcggcaagccgaagcaactgcgcagaagttcttcactctcgagcctcggactccaaacatcccgggagatgcttcgaccacggcgccccaagatctgaggaaatcctctgtgcgctgttcgatttctctttcaaccactcgtagtttgcatccgttcgagttctcgaaccggccttcgaggaaaagcccggaataacgttccgggagagtcgaatgcaaacacgattcgcgagcctttccgcatgaatactcccttaatatattcgcgcaaggcccgaaaaattcattgacttccaagaggatgcacgctcccaggctgactgacgaaaaaggccacggattcgaatgcgacagctccgccattgtggtacaaccaacgcctaccccacattctctccgagaattcatttgctgtggtggagattgcctgggtgccaggccgggcagagggttccctgtgtgcggcaaataatttctatgcaggctcgtctctccaaaatgtgcaatcggagcccggactccagcaaattactcagttgtccagtttgttagaaaaatgtctccgagacgctgatgatggctgttacaaggaaaccttgctcaacatcgccacgaggcggccgtcttcgggaagggattccatctcattcaacgaagtatcaacaccaactccagacctgctgcgtcggtttacgcgcttcaaacgttcacacttcgatgagctgctgatgcatgatacattgacaacgagaaagtgaggatgacagtgaaaggaagttcgttggagcagaagccagatacaagacgcgtacaaatttcggaacatgagtcgccgcacaacttccgtctctgaactcgaactgtcgagattggtgaagccgattctcactcgatgattccaactctttcggttccattggttcgagaaattggctacaggctgcgaaaccctccgccaaaagtacagtttgggcgaagacaagcgactttgcatctgtctggataaactttgggtaacgaatagccggatatttactctcagcgtctgtggaagtgatgccctcacacctgcgatgatcggggaaaccgctgccgtccatgattgatggaggtacatgcttataatgtttaacaaagaatcatccctttgttacgagttcctccattgccgtgccctccgtagtagactctgtgaggaacattgcaaaaactccgtgggagattccgatacatggagaagagtcgcgaggctgattcattgacggccaagttgccggcaagcgtagcaaacgtgtgaagacgaatgagaaagagcccaccgcgtcgattattatcactgatacccccatgaatcatgtcagaaccggaaacttgattcgctctcctgcaacgggaacctgctcagcggcgcaatcaatcccacaagctcagagcaatcggtataattgccaaattcttgacttcaaacggaacgattggcgtccgttgctcgtgcggcacagaattcgtggcgttgttggcattttggcacttggttcctgattactggggattccgattgatgcgatggtgttcaatgtttctcgaatgggatttcaacgttgatttcgatgccagagccattctcactcgagctttttcggaaatgccctgacacttgctagtgtggcactgccagccgtcgaccgcatcgagccttcgaaacgagacagctgagtcaaaccgcaagacaatatgattcgcaacaacagaagaacgctcaacaacggcttcctgccgcgcggaatgggagatttcatcgactctgctcgtgtttcgaactcgtatgcgtctcctgaagtctatcgcggtcatctagatagtttcactctcataagtgagacacctatcggagcgatcaatcgtatcccaggacatattttccatccacaggttgctccacgcacatcacaggaagcacatccaacggtagctgaactcagttgtgactatcgctaccgatcggccaatgatcgataacaattcataactccgatccgaatcatggcaggtgcggcacccggtttccaaactgggtatcgcctgcccggagagccattcgtggctacccgcgatgatctcctgagtttttcctcctggcgaactatttgtcttgggccgcgccacaggcccgaactctgaaacgaactgttcctatatcaaggagcgtcgtgtttcgcgttgctcctttccgtcagacttgaacgttttccaagctctgtttcttcaggaaactggcagcaaacgacgacttccgggaagaacgagaggtttctgatggctttgaatagtgtccgttcaatatagtctgaagctcaccaccgtgaaggggcgaaatcctgactggtcgccgacttcgaatcagccaacctcctcgcgagaatgcatttttacggaagaagatgcggcgttacgtatcaagtgaagtggaacatcgcaagtcctgtatcggacgagcttagcttgcagctaattggctgcggacgtgatttgcatgaaatgacgtgtgattaccatgggacggcgatgacaacgacgccatgtctgctgccgacgattgaggggattgaaacggaatatttggggttcttctgagtggaaggtgtactccgatcggaataaaagcgaccttggaactagacagacgagccgaattgggcgcgcgagttacgcgaaagcagcagcagtggtggtagcagcaggtcgcaaacgccgatgtcctccgggtctataggtcccctatgttgctgcggtgtgtgcgggaaggtctctcgcgaaccttcttgccactcttcccggtgaagccggaactctctcctagttcttaaagggcccgatactctgagcaaaacgttgtcgccgaggatcgcttggaccccagcatcgtcagcggcaggccattctgactctctaccggtaagcctaagctattcgaatgagctctcgagaaagaaacggagcaaatgcggaacggagtcagcgagagaatcaaccggctagaatccgagtgaaaacagtgcacaaacgcgaggttttatggtgcagcgtgcaaagtggcatcgtgtccggactatcattgtagattgttgccgtgtccttaacaggatttcgattcggaacatggccaccaagagcgaacagtgaaaccgtctggtgttgcctcaatggtgtgctgtcgtcgataataagaggcttctggatttgctctttcggctcggtagtggaaccgtgaagtattccgccttcgatcagttcacttgagtatctgttcgtgagttcgtcagcgagagagcctctgttcgtcacacagtggcctcagtcttcctccccccgctcaatgacggaatagtattcgaaagctctaccccttcctccaacaatcatcttctagtccattctcagtgctcacataaaggcattgcataattgtctccgcacctaggttgaccgttaatccgatagacagacacacggatgaactgatacgatggatggaagaagagcttacttcaaaacgtcaaagcgggaggggcttcaagtcgaacgtggcttttagtactatctgtcccgaagctaacgcggagcgttgacgcgcggacgtcgaacgtcaactcacgttccgttgacggggtacataaacctctgtgacgttcgaacactgccgactgctgaaacaaaggagattcgcaagacgcccccatcggcaccttaagtggacgacatagagatacagaactaacagcgaacgaacaacgctatcgtcggcttttcgtgcgcggttccctcctaaacagttaagcgctgtttcgggtcgaggaggttgtggtgagcggaacgagagtttctcgtcgaacaacctgtggttcgaacagtaggccgataaaccgagctgttgttgactgtttataatttaccgtgatttagcgcaccggccccgaggaaattctgtgagtgaattagtcgttgttgtggctcattattatcagtaaagcccggccagtcccaccgttatgtgtctcggggaacaaacgagcgagcacccaacagattccagagcgggaagcaagcaagtatgcaagctcgtgagtgataggagaagagcaaaaccctcggcggtgccaaatggccactgcctctagggtaaatatcgtctcggcaaggtcattcgatcgtcgtcgtcgtcggcggcttcgcaagcgtcctctgaaagctctcacgggggtcacccttaccgaaaccggctgcgagcgagcaggaccttctcaccattttcgaccaagagacttgtcagaccttcgaacaatgggtccccaggaatttcggtagacaacaagagcaagcggcgagccacccggttcttcccctcaaatgactcgagcccctcctcccgaacccgatcttctcccccatgggtgatgaggttcccgcgccggcccccgctcgtcattgggatcttctgctcatgggagcgatcaacactcgttcacaacttgtgctatgctcgagagtcggcgcgatgacgcggcctcgagcagtccgacgctcgagaacttccgtaactggagccgattcggccgagttcaatagacccggcttccttcgagagttcccccagctgtgtctgctgtaggagctgaggtcacgtcctccgtgcgcggaactatcgcggaccttgtcccccacatcgaaagcaatgaggctcagatggcccgaggaagaacgcggatccaaaactcggatccggctctccaggtgattcgactcagtatcccgctccttctatctctggcgtgaacgtctcggaaggagcgttgcggacctcgcaatctctgaagcgactggttaacagcgacagtgatctgcgttgccgcttggttaatcattccgttctggcagctcgctcttagtcttattgtgagcgtcggaggtcttgaggagttccagagcgcgaagaggctaccacccgaaccaccagggctcggctggattgttccagacggttggaaaccttacttcctcctagcgcatctaatctagatgtctcaagtcgcggtgttgcatcgacgatgcacgcaggtcccctgcggttcttagcggccaacaggcccaccggcccagtatgcaaccgaccgaatgctagcaggcaggccggccgaccggtagacacaggagggcggacgagcaagcgggcaaccaagcgaacggcctagctgcgacgaagcaaccgaaccttagcccagaatagcaaagggaaacggcaaagagtaacccaggcgagcctacggccaacccaggtcctataaagtctcgtttccaccagaacaacccgattcggcttcatcatcaagtgtcgcactcgccgctgctctcgttgcacatgcccatatgcaaactttatcgaaatgatttccatagtggatgggccgcgttgagcttcggagacgccccccttctcgagattctgggaactggggcttccccgacgcgattctatcgaccaatacgataaccggaaaatcagttgccgaaccatgatttcgaaaagaaattcgccaactccgcgaggaagccgattgcgcggaagctaggaatcggtgtcatatgctcaatcgggaggatcaatgatttaggtttttaattgtcgtcgcctaatctgctcccgatgaggcttggctatatttagactcgcgacggtcgtctccgttttcggtggcggctcgaaacttgcatagctcacgttttcaacgctcgactcaatgcgaccgtcgttaaaaaccgtgtgcttctgcggccccgatagcaatccgcttctttgttgaaatgatgatacttacaagaagcgatagcgtctctaaagccatgtttccacgaggccgcccgtaaggttattggcaagcgtgaacactatgcgaacgatggagctccggaatgagcctcgacttcggttgtcgcccattagaattcgcaccggcagtggcaatttaataaggtagccagtttcaagggacgcttgcagcgttcactatcgcagcttcaagggcgttctgggaatgacagctaatgcgtaaccgaaggcgtctatgtgtgactgcatgctgcataaaccaagatactctgcgtagattcactttagagcggacggatcgaaaagatcgcttgctgctctggtggaggtggttcactcagtagacttgagccgttcgaccgccacaagcaccctccgtgggaagcagttttcccgctacatgggtttatggggacacttcggatttatttgcttgatttcattgttctcgaaaacagttgcaacaatctgcaacaccggacaaacaggcaacgccatagaaagaacattcgtccaaatatctcatgccgatgacgactcactttgacggatccgcatatcgttgcattgttttgtcaatgattgatatttttctcctcgcgtgtttgaagctgtcgtgctctgaaggcccctgaggcagagacaccaggcgtcacttggaacgacgcattccactgcgtaactgcggactggaaccttacgccgggttgcaccgagcctacaactagagttcgaagcgagcctgcgagaggttttccgcgaactgggtttccggaaaggcaccagtaatactggtctgaagagtcaatcatttatcctgtttctccatctctctcgaactgatccaaatcaattcatatgggaaaagcttcgactcaaatcgaaatcgatcagcgcagaactcagcgtacgtttctgagctgcgtctcgagtcgagaattaaatcttccgaccgccacatcgacttcgcgtcaatactagagaatccaatgaaatctgatggaatatttgaaatgattccgcttcgtcttgctagcgtcgaatatcgaatacagcaatgcgccgcagattgcaacgacgttcgcaaaataatacgtgttcatgaagaagtcctgaatgtgaatgtccaggaactgcgagaacctcacagctggggagactgtgcagccacgtaccggtcacgcgtcggcaacgtgcctcaatcagcgcggaagtgtcgaccagcctttccgacttttcgaatttggcgctctcttccctctcgactggtttcggtctgtgcgtcatttccggcattcacgtgtccaatcagaattgcggacgctgagagaaccctgtgggactcttaaagtgtcaatcgcaacgacgttagagatctgcggctgtccgacgcctgtgccagttttgaagggcgtctctcaggtgggttcggatgcaaagtgtggagatactcgctgaatttcttccccatcgacgaagcctcgctagaagagcagtcagccggcccagacgtcggctaacgtagtcgagatcgctcgatggttggactgctggctcgttctgaggttgcttagcgttcggcccattgaaacgctacgcaaccctcgcagctgatgcggcctagtgcgactttcgaagctcccaaatgaagtctgtttttccgaccgatgtagcgtgaagcactttcctgtgccgacgtcggagacccgcaccgagacgtatcttgacgtatgagaatttctgatctgcagcagtcgctcccgcaacaggctctcgagcagcatatgtgcgctgcgcttgttcggagtgagctcgtcgtcgtagccgccacctgggcccgactggacaaggttcgaattcgatttcgattccatcgggatcgtgtagagcgctcgatctgcctgtgaatttcgtgctttgggtgctccagctccacgtgtgattctggaacgctctggaatagtctgcgccggccaactacaccgggtagtcggatgctgttccccgttcgactcctctgacgcgatgccagtgaactcttgaacccattcgattgtcgcgattgaaagttttggaactctcaagtgcgtgcgtgcgtaagtgagtgggaacgcgggtcagatccattgttgtcgcctcttagtcggtcgattgatggccgactctgctgtgagcgcagagttgacgtgtccttagcatctttattgaatgagccactgtcgccagcagcgtggccataattgtgccttgcgcatcattgcccgactctcactccaagtacgtgacccggatatggtacctaagacgacggatctgagattcccagcgattggacggacaccaccaactagtgtgcgagcgacaaagcgccaagcagcaccaagcaagtcactactacgcatccagtcagcgagccacgcaactggcgtacatttttcctttttttgctcttcctactgctagtgagcggggagcgaggaagtcggcgatgacggtttttctggatgaaaacgaacgatggtgcatttggcacagtctcgttctaagtagcttccacacgctcgtgtcgggcaagttgaatcccgggagcgtttgcatcccgaatgaatgcaaaacccgaataacgaccccgatcctgctttggaaaaagctcgcggatgtcaccgttccagagatgaagcgtttctgacatgacggggcagcgaatgtgacacagaagccggcgccgggaggaatcagctgatcccgcgccggcatgggattcggtgatccaacctcaatgatggggggtttatcgttacgtgtgctcaatggttttccaaccgctacaaagagttccgttgaactccgatgcgagggttctagccaagggacactctcggttttattcctatcgatcgcttcgtggaacgtgagagagcttgtgtacgtatacgtgtcgaacgcacgccactgttggctgccggcgcaactcgagttccgtgaagagaggccttcgtcaccgagcatctcggaaacgaaggggtgcgctgtgggttcgcgccagcttggaaggaagcaatattagataatctagctcagggctccgaggggtacataaggcttcatcgctcctcctctgtggagggaagcagccgatcatcctgaacccatcgttcccggaatgaattcgtggcggagttcctaacgatatttatcctctggatttccagtgccgtcgtcgcgatcggcccggtgtgagcgtcgttgatcaggggacctcaccgtcaaaaagtttacggaaagagtccggtgagcctccattgcttcgcaagcagctgacctgcttccaaaatggagcacggccacgcgaagacctatcaggaggtgcttcagttcttccagacagatccggatcgcggtttgtccgaaagccaggtcaagaaatatcaggagaaatatggacccaacgaattgcccgccgaagagggcaaggctttgtggcaactcattctcgagcagttcgacgatcttctcgtgaagattctgctcctcgccgccatcatctcattcgtactcgccttgttcgagtctgaagaagacggctccatcaccgctttcgttgaacctttcgtcatcttgctgatcctgattgccaacgccatcgtcggtgtgtggcaggaacgaaatgctgaatctgcgattgaagctctcaaggaatacgagcccgaaatgggcaaggtagtccgcggaaacaagcagggtgtgcagaagatccgcgccaaagagatcgttcccggagatctcgttgaggtgtcggtcggtgacaaagttcccgccgatatccgtctcgtcaagatctactctaccacgctgcgggttgaccagtccatcctcaccggtgagtctgtgtccgtgatcaaacacaccgatgccgttcctgatcctcgtgccgtcaaccaggacaagaagaacattctcttctctggtaccaacatcgcctccggaaaggctctcggcatcgtcatcggtaccggtattgagaccgccatcggaaaaatccgtaccgagatggctgagactgaggaagtgaaaactcctctccaacagaaactcgacgaattcggagagcaactttccaaagtcatcactctcatctgcattgctgtctgggccatcaacatcggtcacttcaacgatcccgcccacggagggtcctggatcaagggtgccatctactacttcaagatcgctgtcgctctggctgtagctgccatccctgagggtcttcccgctgtaattaccacttgcttggctctgggaacgcgccgtatggccaagaagaatgccatcgttcgttccctgccttccgtagagaccctcggatgcacttcggtcatctgctccgacaagaccggcacactcaccaccaaccagatgtctgtgagtatcccgagttcaggccttcatttctcccgagttttgaaaccgctcggtggcgttcggtagtgaagccattatttattccgagaaacccgtttgagagacgaacttgttactcacgcctttccccaccgttacaggtatctcgtttcctcctcgtcgatcactgcgaaggcaacgacatcaacttccacgagttcgacgtaactggctccacctacgagcccatcggcgaggtgttcaagaacggatcccgcatcgatcccggagattacgaagcccttgttgagatgtccaccatctgcatcatgtgcaacgactcgtccatcgatttcaacgaatacaaacaggctttcgagaaggtcggcgaagccaccgaaaccgccctgatcgttctcgccgagaagatcaaccctctcaagttcgacaagtccggcaaatctcgccgtgacgccgccctcaccgtctctcacggaatccagtcgatgtggaagaaggagtgcactctcgagttctctcgtgacaggaaatccatgtcctcgtactgcgttcccaccaagcccaacaagctcggtcccggctcgaaaatgttcgtcaagggtgctcccgaaggcgtgctcgatcgttgctcccacgtccgtatcggcgacaagaagttccccatgaccaccgccctcaaggaaaagatcctggccacaacccgctcctacggaaccggtcgtgacaccctccgttgcctggctttggccaccctcgacgctccccccagaaccgacgagatggagctcggagactccacccagttcatccgctacgaagtcgggctcaccttcgtcggtgtcgtgggcatgctcgacccgcctcgtaaagaggtcttcgactctatccaacggtgccgcgccgccggtatccgtgtcatcgtcatcaccggtgacaacaagggaaccgctgaagctatttgccgcaggatcggtgtgttcaccgaggacgaggacaccaccgggctctcctactcgggccgagaattcgacgacctgcccattgacgaacagcgcagcgcaacccagcgtgctcgtctcttctcccgggtggaacctgctcacaaatcgaagattgtcgagttcctccaagccgatggcgagatctccgccatgactggtgacggtgtgaacgacgcccccgctctgaagaaagccgaaatcggtatcgccatgggatccggaaccgctgtcgcgaaatctgccgccgagatggtgttggccgacgataacttctcttccatcgtcgccgccgttgaggaaggccgcgccatttacaacaacatgaaacagttcatccgctatctgatttcctcgaacatcggtgaggtcgtatccatcttcctgacggccgccctcggtctgcccgaagctctgattcccgtgcagctcctctgggtgaacttggtcactgacggtttgcccgccacggctctcggcttcaatcctcccgatctcgacatcatggagcgcccaccccgcaaagccgacgaatccctgatctctggatggctcttcttccgttacatggctatcggcggatacgtcggtgccgctactgtgggcgcttcagcttggtggtacatggttgcccccgatgggccgcacctttcgttctaccaggtctctcaccatttgcaatgcctcggagacaaccccaacttcaagggcatcgactgcactgttttccgcgacccgcacccaatgacgatggccttgtccgtgcttgtgctcatcgagatgttgaacgctctcaattctctctctgagaaccaatctctcctagttatgccgccatggaccaacctgtggctcgtcggcgctatgacactctccatgtcgttgcacttccttgtgctgtacaccgatatcatgaatgtaagtggaaatgtgcttctcgaattcagatttggcatcggcgtctcggcctccgacagcggcccttctcctaaacgaattcctcctctatccttgcagactgtgttcagcgtttgccctctgagctcgaccgaatggatagccgtgtgcaagatgtctatccctgtcgtcatcctcgacgaaaccatgaaatacatcgccaggacctacatcgatggtacgacaaagcacacacatattatgcttattgaaggagcgatccttggcgctgcgtgggctctgtacttcggcaccgtcctagtctggtctcccttctactagagttcactatcgagattcttctcttcgcgtcgtagaagagcagcttgaaaaattcaattcctcccgatttcaagtctcattttcgagcgacagcagaaaaacagaacgaccatacaacaacagcataaaccgaaacaacactacccctccatcgatcatgatttgctagcttgagtcgagagtgaggatggaacaacgcgttcgttcgaagcgacgtatagatcaaacatgatttgaaaacgagatcaatcaatggcggaaatcggtgaaatctgccgctctcagtgcccacgaagctgtccaatcgatcgctacgtgtgcagtgtctccaagcctatcttgtagtgttcttaggattttttgccagtatttgatgagtctgtgtgtagagttgattgtcgaattcctgtttccagtatggcagttgcgtgcacccctatccaactaatcgtatatgagtgtgtgttcttttattctgctcctttgggagtttcctctcatcgagattctgatcgtgcgtgccgtgggatgtctgtccagcgtactcacagtactagtcctgttctcctcccccttcattttccgacaactttcatagctacggctagattcactgaaatttcgcaatccacttccctaaccactccggaaaaccatgtagtcaggtcagtagtaagtacgccgagttccgcgaaggagttacacgttccagtcgagtctcgggtaagctagctagtttttattattggagatcaatttgggtctgagcaacgaggcgtcgaaaggtcgaggtgaattcttctccgagaaatcggtcaccttctgttttgacctacgaaaacctcatataacgctcaggttccccagtttgctccgggtcaagaagcacgagagtaacacgcgttgagagtacttcggaaactcgcgcagcaacccacggcaaacccactcaattcaaatatcagtcattgcgagtcattggaaagaatgaaattcatctcataagcagcttagggggtgcacgcgatctcgcctctggatggaaatggtagaggatttcttttgtacggaaaatcccgttgctcctcgagcatcttggcacttcggatctcgaacgttttgctgtaccattctccaccatgtcgtgagtttgaatcgtcgcaagaaagtttgcgtggccagggaacaggatggcgcacaagaactggtccgcttgacttgagtaagaaggctgaaaataaacagaagccgtctcagacgcatttctgttcttgaaggcgcgtctgaagatggcctcatggctatccgttcgacagttaggggcaaacgttttgtacagtgtcgaagaaaaggtgtgtgtaaatacgagtgatttaagcggattctgggggctctatcacgctatccacccgtctctgagtcggttcgagagatcgacgccaaagacgaaaacgacgacaaaacgaaaaaaaagatgaagcattcagtatgcgagggaggagaaaagattcagtaataacgaataaacatctcatctgactatattaccgtacatgtcggcgaacagagtttcatccatcgtaactttgacttctggacggcactgactcactgtgcgactttctgccacagatccagttgctcctcagtcgaaaacaccgagcgatctatctacgcggaaacgatcgttttgggttacttggctgttttttgttgctcctcataatctgcagtgctccctcgagactcacgattctgtcggttagtttcattgaaaattgctggtcgaggagacgggagccaagcgacgagagtgaggtctcaatttctcacgggctccgaagtcaagagacattcgatcgttgaagccgtgacaatcgatctcctctgagaccgataaacgagaacttcccacgaaagttgtcgctccctcccgaatttctcaacggagtttctctggccgctggctgtgtgtcttcattctcacgcttttccaacggcggaatcattgggacttcgttgtttttcggaacgtgtcccgaggtacatttgtgagtcaatgagatgcattcggtcgagagaaactcgaaagagagatttctggttagatctctcagcccgtcactttggtgggaaacagatgagattgggaattcgtggttgctccaactgccgttaacgaagtctccggcaagttcgaagtcgttcccaaacataagctagatcgtaccaattgtctgaaaccatgaagcttgtgatgattccgtgcgagattatcagataacctctgccttggtgcggtaacgatgatgtgttattgctttaaatcatcacgacaatatacctcaccgctgacatttcttaatgatgcttccttcagcctctaatgagcgagtttctcgagcaatgacagtttctgcagaacggctcttcgtggctgtaatttcatgagtcaatataacgagtcgagagctccgaaagcgttctatgagacaggtgtacgaatccttcaatgaacaaattctccctggcgaaagcgttgtcggatagactcgtgtgtcagcatcagactaatacgaagacggtatgactttctactcgatgaaaataaagctggaacatctcaagtgttcagaacttcccctaccactctgtgtgctcctctgtaaccattttctccgctaaaatttcaccgcagtgtttgttccgatgccgtatggtaagttgagagccgtttcctcaatcattctcttggcattctcgactaaatcatttcacctgcgccgagctgttctcgaaatctgtccaccagctagaaccatgcacaagtttcgacaaactttcgaggtcagagatttttctcttagtgagtgcgagttttcttagataggaatattttctcgattcctcaccgatgctctggacctctagggtgctcgatctcgacggcgaaaattgtttctcatgttgttcggtcgctgaaaagcctcgattcgtgttggccggtgtcgtacctcgttctttccgtccgctaccgattcaaacaattttgtgatagagattatcgagccagaatccctcccgccaagcccgatccctgtgaacgaagacccagaaaaacctcgatccatatattcacaaatgtattcaactaaccgttcgcatgcatacgtccagttaacgtcgatgacaaataccgcaagccgaggttctgaaacgtgtgaattgacctgccagaagtgagctcgaagccgcgtgagtattcagcagcatgagtttccctgagatgactgtgtttccgacgggaaacacatgttcagaaactgagctcatacttgatccgcctcattgcatatcatgacttcaacagtggacctgggtgaggattgaaagctaaggaaatctcttcaaatgttccagtatcccctctcgccgtgaagtaaacttctcaacaacaaaagctagttcgcaaggccgtttcctgcacgtgatcgcgcgatgaaagtcacagtggccggattcgccgtagcttacagggagcgcctcaacacattttataatctatattatgatcattatcacaccaatttatttaatgattcagtagtagcctcctcttttgaaacgagttgtcatcgaaccgtcgcatctgaactgtccggtatagcgctagtatcggtgatcgagaggaatagcccgaatcaaacgaaggagacggccgtgatagcgaggaatcgagcgaggaaggaatcttcgagcaagagacatctaccgaaactgttcgacgcagacgacgatgacaacggcaacaaaaaaaaaactccgatttgaggattgaagattttttgtaaagcggtgaagtggttgattgaaagatttgacactgattgatgatgatggctacatcgagtgacgactatgcacaaacagagcacaagcccaacgcgatggggcaccatagacgacacacgaacacaactgtacagtaccaccacctcttccagcaggtcaggtgcatacgtagtctgctgtcagcagttccttccagaacagtagccaaccagcggtggcaaagagttgcgaaacctcatcagctactccaacatcatcttccatcatcgatcgccggcgtacagctgttggggcagcagcgtacctgagctgccgctcctgctgacaagaaaagcatccttcgtcatttggtagaaaactggaacccataacctctgcaacgcctgcgacaacgataatcgaaaggttgtggaaggaaacaacaacaacacacagacacaagcgctcggcagctgtgggctaatcgttgatgattcctgcattaagatctatgacgcttgccgagacaatgattcattttaataaacagtcgagaagcggaacctgtcgtacctaagctggagattcttcattgtattatccttagagataatcaggaacaaatcgcgagcctcaaaggtccgatcgcacggatccaatcaccacaaaaaaacaccagccacagatatgtagaaggtgcaaaaatgctgagaccggtaatcggtttggagcacgttgccgacatcgaagcagtggcggcggtggcgcttacccattatccatgataagcttcgatgtcgggttcgtgcattcattgcccaggagcctttgagagctgtttcggattttcaagcggctccgcgacattgatgagcctccgatgggttacgggtggggactggtggagggaagtggtccttccaatccactaattaattccactacattcccacgagaatcggaataaaccttcccgcacccatcactggacctggggcacatctataaccccgacacgagaagcgatgtgcgggtcaagcatgcgaaatacagcaatcatgccggcgatgatcacgacgaccttgggactaccacccatccttactttatatgaaaggctgacggcgtggaggtgaccgaggtggtcaaggaatcttctgagactgtggaagaatattcaaaggatgtagcctggcctgtacatcgacgaacagcacaataatcaataagatgcaactgaccgtgtgagaataatcgcgctccgcgtgatgaaattggttcctgttaggtccggaaccaggagattctaggccatgccgcacctcagggagagccgaagtatgttcgaacgggaataatagtcggaagacaacaactggctcttcaatccattccagtggttcccgccgataccagagcgtatatcactgcatgaaaaccagacctcccatgtctcacgtaggattgctagagttagaccgacggagagtgtttttactgagaagaatatcgaacttgcgtctcgtttcggaagtcgacggacaacaatgagtttgacaaactcacgactctccctctcctgattcctctgacgaagacatggcccgcagaaacctgggcttcctgaaaaagaattctggtacatgaaacggcaacaggtggtcctccaatgtttaagcgtaagtctctgcggttcgcccaccggctaggaatgcggctcgagtataacctccagtggggatcgcagcccaaaccaccaccgaacccccatcggagtctcggctccgggcgctgcgtttctccggtgcagatcacgccagtaatcgcggataccgtcccgccgattcgggttgaatttcttctcatccgaaaatatgactgtgccccaactcgagaccgctcgtcgcgtaatcgattcgattcgtgaagctatgctctttcaaccgaagagtaggcatcattttctgctatgtcagatgctacgcacccgaaagaatacttctgattcgttcggcagacgcagacagatcggtcccggatttgatgctcgaagcacttcctccacattaagaagtcccgcgtgagagccttgtttttgattgagactgccgtttcgtctgaaattcacgcctcagttcgtcgggtctttccagtggttctgcaccatgcatcttgaaggttcgagtttgttccgtttttcgttcatcgacagaccgcgttcaagatagacaatgatgatcagcccatgatgttaagaagcacgaggggtgctcgaattcgcgacccattggcgcaatggtgtctgcgcttgaaactcaacattccgttgtttccgttcccgagtgtgtggggcggccttatccaaacttccaacctgaaattgaactttccttcatagaatctcgaggagtcgcacaccctcaagactctcaataggagaaaactcagggtttgtagcaataaatactaaacattgctttgcgtcaaatttctgagcttctcacatcgcggatggtgaagtgaaagcacatctcacggatgtcctcagagcatttctcgaatgcgcaaaatcggcgaagagaggcgtgctaaaaccatgtggcatcacgatgccacaggggtcaaacctacctatcgaggcgcagatggttgaagaagctatcgggaaagtatccacagactccgcgaaaggattggataacatacctgcgtatgtgatcaaatccatcggcattggggtacgaatacaaatcccggatgttcacggccatggcagaaggatcacaaacgatcgcggtggaatggcgctaggggaaagtcacgctgctaccaaaagcgaactcgaaggagaagaacttcgaaacatatcgcccgctcacgatatccagtattcagtacagactattcgcaaggatcctctgtaaggaaatccagaatcggatggtgaatgatgggatcctaggagagatgcagcattgcttccggaatcacaggagaggcgacgactgcatctccatcctcacatctgcaaaagaggccgccaggtggggaaaaaccggactgataacctcctttctggaacagcacgcgtgcatacaacagaattcgcctgagagaggtactggagaggaatggtatgcctaaaaccttaccgaaaataattcggcacccgcacagggagaggagaaaaaacgggactcagattcaaccccgataaaaccgcgattgtagaatcagctaaggtaaaagactcaacccagaggaaacactccgagtacagtatcaattgataccggtactcgaacagtgtaaggtcccagggcccaggaatgacgctctgtaacaagaaaaactacctccaagaacagggagagatctgagaggaaaaagcagagggagtaatcagacaaatgcacgtgaaatcgctgtggagtttctatagattcggagtcaacaaaatctaatgaaaaagcacggctgttccagcgctaccgtacgccaatgcggacacaaccatgcccgttgaattgcagaaacggctcaaaaacctgcgactcgaagcgggaagacgggctttgggacaaccgaacgcgaacaccgtcgtcgactacacagacggagaatcaggatgctcatccttcgaggcacgcggaacttatgcactctggcagaacagacgaaatggatgaagccaggtggccaaaagcaatccatacaatgctggatatcacaaggatagaaacctcacttaagagaagaattgaacaggtcaagaaacgattccaatgcgaagaattgaaagaagtatcaagcggcgaggcgaggatgggtctcagaagcaacaagaaatatgttgaagagaggctgagtaataagctggatagggagtggcgaaaggtatgaggtgtcggggtgtttcggaaaagaaaactcttgcccgatatcgtcgttccaaaaaaattgaggaatcattgaatacatctatgacaaaagtagaggcagcaccgctcgcgaatgccagagcgggatgtctacagactaggaaatacaggtcaagatacataaacatcgaagcgacccgctaaggttacggagaggagtgtgtattacgggaaagactaggactacacgaagagagcacaccgagaatgatatccgacaccaagagaacgcttcagagattggacaggacaaaggacccagaccgtatgtcctaagatacgaataaccgcatcgtcgaccagctgagtcatcgccccgtatcaagggttttctgccatgcttgaaatgaagatacagcatgaagatggtcgataaacaatcaatcaaaataagctctgagatctctagcacgacatcaatagctccaagctgttcttttttttttggaggaacgactcacaaaggcgagaccctatgattcacaacagaaactgtgaatgcggagaaaatacaatgggagcgataggatagccatggtggggaaaagctttacgaacgactcagaagaatggaaaattcagctgcattgttggtctcatatgcataatacccgtcaagaaaaacctacggctcattatctgggaaatgggatgggatagatgcaggaagaatttgagattgtatgttggagggaagggtgttccgaaggcgagatgcgcgaggggaggaagtggagtcatactgagcacaacgattgctgaataattgaacagaataggggtgttgtttggcactacgtctggtttcaagaacgggggccgaagagcagaaacctcgttgtttgatgttatgttaaggcaggtgagcttcgtgattcagatggccttgagattcagtttttccccacgcatcaattcactgccatttggtccaatatgaattcacgtcttgagacctggagacttggcaggaattcacagcacagcgtctggaacgccgatcgtactctatttatcctatcagatcccggaattacgccaattcccggggtacaaatgatggcaagtacaaagcaacttcatattttcccaagaagtgtggtcaggtggatcctagaacctcgcatgagcttctcatatgggtgtgtacttccctgcttaattgattccactgcgtccctcggtaaccagcttcccgaagaggtgctcatatcggtgtctcgggcttaatctcaaattgctcgattgaatgccgaaatctaatgagggctttccccgtgaatttgtaaccctctcgaaaaaatcgaagcgtttccggttcatcacgagcgaagtttgaggacgaactagagcctcaaaattctttacatacattacaaagtaccagcagagtgcacctaatccacagggaatgtcgttttcgcatcgaaatcgtcccgcatcgggagctctattcatatttcgaacgcgaggttctaggatccacctgaccacacttcttgggaaaatatgaagttgcttccgggatcaatgtgaccatactttccagggtccaggtgggtattggttcccccctcggggagcttgagtcctaaattaactggggtcgagctaggatgaatatttccgctccgctggtggcatgcgtaaacgcatttctcacgcacctctctggaaaaaaccaaaaggtgggtattccgggatcgatcagaccatgttcttggggttgggtgatcgcggggtcgattggtcgagtcaacaaatttctgttccctggccgctgagaaagttggcaccctcccatccttcacaccgatcaggtcatgcgacgcggcccagtcttcgatgagcctctccctcgtatcgttcacttgcctccccctgttatgattttcgcgttgggattccccttgaggacgatgtttggcctcgtttggcccttgatgctctctcccagctcttacatgagctccccgaaaaagtccaagtccacatgtggtgatatgtagcaggggtagaggactcccagccaatccacgtcggccctcacggacccatcctttgcccctccctctcagctccactgtactcagacaccccttgggtctctcccgagactgtatatgctacttcaagggatccgaggagccactggtttcgacgaatcgagttaacgaaacctcggaattttcgagatcctggttagggacctatcggagcttgctgccagcttaccatacagagtgggcatggccttacccaggtcttccagctccacaacaaatgcccaaagtttatccggcaagtgtctctcaaaaaacccagcttttcggcactcaccacggaggttcgcgtgtcaccggttgtgcaaccatactctacaaaagcctctgaattctttcgaagacggggcgacgagaaaagcgacggattttcgtaccttccggtactcttgttggagtgccgtgattgataaccataattcatcgtagatgcctctctcacggtgcatccgattcattctgaacagtagtattgtagtattgttgtgttcaaataattaggaaacggatcggctcttcttcaacttttagtatacattggggaaactctctgaaatgctgatccaattattttcacatatttcaagttttacaattgagaacatagatctcatcctacggcttgcttcgcagggatctggtaggtgcacaagtcgccgatcttcggataactcaaacaaacatcgtcttccgcacagcaggtcagagtggtgcaattctgtaatgacgctcgagcttaccaatcccttacattcaacgcaatatgttgatttcaggtggagagaggaggaaaagggagaattgagataggtcgtgatggccgagtggggaacaatggagttcgtggatatttggttgagctatcctgtcgcaaaaccatacggacccctccagttctcacacagtcagcgcgtttttgaagtccagttgccgagagtgtcaacaccgacatcacagccaacaaaaaggatacgaagttcactgagagtgtcatggcaggccgggagtcccatccagcaaaaggtaaacgcggccttaatacgcgataagttgcggcaaattgatgtctcgacaaccgtgatcgttaggcacgaataaccgtagttcacccgaggcgcgtgattcctctgggtcgtcagtcaatccaaataaggcgacttccgtctgattctctcgaagtgatccggacggaatgccagttttatcggctcaatgtccatcgtcgaggtaacggcgagaatggcaactctctctactggctcagggggaactgttgatggttttggagacaatttcgatgaatcctcgtgttcgattgggtcggaatccgaactcaagctggtgtgcgttcggggtctcgttaccaaaaatttaaagaatcatcagatttcggttttctcggtgaggacacgagaggaggcagtcggcgatatcactacacccatacggaagctcagcataccagctactagggtttcctcaacagaactcggtcaaactctcggagacttgaagtgcttttattccgtcaaagaacgcaacgtcgaagacggtccgccgtgctcatgcttgtcctcattctcccgatgtttcgtttagtagtcgcagtatttcttcagtctcttccgaaacaggtaccaggtgggaattctcgtcgtcgaacgtgagatgtcgatcgctagaacccttcttacggactttcaccttgaaagctacttcgagcagctgatcagagtcatcatctgaggactcactcgaaccctgtgcgaaattcattatttctttaatcggcttcaggaaatcatagcagaatcatgtctcgggcattggtgataccttgtggctcggctgcacataggaccgcggcatcgggccggcatggaagccagaatcacctatggatttgaggtttctgtaccagacatgtctctcgttgcaatatcctacagattggttttttaaatcgcacgggagctctgccgggtaaatcttgaagcttggcggttctgatggcgaaaatacccgatcacactccaagaaggtaaggaccacttccaaaggagcgtctcatgtggtgaagtatgtataacaccgttattctcagctaccatggagctgaacgaactcaccacgaggtccactgaggatcttcctcttgatcatggacatgggactcacgcttcgcggaacaataactattaccgaaacccaaaccgctacgatgactctattcatcatgagaactcagagctgcgtcgtcaatcgcagcccgtcaacgtccagaaatatcaatattcttgggtgtttggagtacccaacaacccgaaagggatatgtttcgctgtagcgttttctagagcagttttgatttacagtctctctctctgtcctatgacacggagagtcatctctggtccctccgctcacgatacaggctattaaggacagaaatgtgatcatgttttggcccctgggagcggctgtttccgtatggcacgtgttaaactggctcgggtctcgctcgtggccagccaatgcacagaacttcaatcacaggatcaatgcaggttcaatgcacgcgttcacgattcgtccccacgcttctatcattaccatgcccaatgagaattttgaatcagggatgtgatgtggactttattacaacttgcattgagctctatttgttaaacgagtgcaactatctacttgagcgatcatcaacaattctttctctctccctttttcagtgaaacttttccgttgtcaagcacatctacaatttatattttccatccgaaacgaaccgtccaacggatagtctcaacattcgagcatagttctttgtcgcgttgatacaaacccaaacattcactcatagatcctccgttccacgttcgagaggctccccaaactcgcaaagtccgccggagtacttctgacagaacatgactcaagccaggactcaaaggacgataaatcgaggtactccgcgcccacaaggaatttcttaccactcgaaacttgaagcgtttcgcacattaatgactcaagtaacacttcgaaccctcacaactgagtccgacacgaatactttgatggcactgagctcatacgaccatagcgcagaacgagccctaaatcgggcatcgtatgcgggttcgcgaacggtgagatttctatccgaatctccattcgagggaagacaagttcatcgacattcctgcgagtgcacttgccagagcgtctctggtttgggaatctcgcctccggtatcgttcctctcaaccaggtatgcggtcaaactaagcccattatagcctgtactgcttgctcgaggttccaattcgttgtctcgagaacagatttggtttcggagaaagggatctcgtcgagcttagcgccttctgcccgcttcgatagcaaaagtcgaagtttcgccagcttgattgctttgtgaatgtcccactccgttatattcaaagccgtcagacagtcctccgatgggagattctcgtacgccaatactttctgcatgatgtgcacttcatcagaatccgttcctcgctgtcgtccctgcgtcctcctggcggctgctcgatcagtgctgaagtcaaggagatcttcacagctcacgtgtcggtcgagtttctttttgggtctcgcccccgtcgcgtcgccggtgtccattcgatcgaaactccgcgaggactccgctctcagggattgcgtcgagttcgatgggcgattccgactctctaagaggggttcaacagaccggaagtgtcgaatctcgggcctgcagggcaggctttcagaagagccgaacgaatgcaagggggaagacctcaggagcgactcgctgctccgcgaagcaggacgagaacacggtcgctcctcctgtctgggtgttacttgagccggcaatctcggcagagtttgcgaagacactctgccattgaccggcgctttgaaggagttgttattgttcgcgtcttgttgctcgtaaccggggagagtgagaaccaggggatgtattcggcgatgatgtcgaagcccttccgtcttcgttttgacggcaggcttcggtggcaacggtggaggtggctcagccagttccgagcagttggaataagttcggaattcccccggcggactgtcttcaagattgcaggtcatttctcctttttcaaccaacgccgagtaaacgtcggtgacctcgcggggcagcgcgtcctggatctgtttggtgttatcgagcatttcagagaagtgtttcttctcatggtgatggcctttggtgttgaagaggaagaagcgcgagccgtgtttgcgggtcggggtgttcaccgggctttggtcttgctggaaagttttgctggcgaggtccttcgcgtactggatcgctgagtcgatggcctgctcgtcagtcggcgagatcggtttcacgatgtgtcctgggctcctgctcttgatcagaggacgagtatccattacagtggacgtggaggaggtacttccgtcttttctctgcctgttgctcattgccaacgccgcggccacgaaggcgtgctgatcgggctcttctgttcctcgaaacacctggagagtagagaatacggtcaatatgtgtcgtttgctgtttgaagaggttggagagggcgacggacgagtggaaatgagattcaggaaccatcggaatattgtcgccaggaaggaagccgtcaaaggtcgaagcgaagcagagaaaacagagcagaactttgggttcctgtgcgctccttcattttcttcgcagaggcattatgatgcatggacgtgacaccacgaatccctgccgctcgtgtgcgctaacgggaaaacttgaacctcgacgtcatgcctcaggcttgcgacaaacaacccataaagacgaccatctggcttggcgtgaatttgctgttcgtcgtcgttttccgttttcgtataaaacggtgagtgctttaatgagaacgctttgttgggttcgcgttcgctgcgtgtggaaaaaaacttttctactccgtttgtcttcatcatgtcgacccttgctcgggtgagcggggaacagaagcccatacccagagcgacaagaaaagaacaaccgcaattaccatcattgccgccgctgctaacgatcgcagattaactgcattcaacgtagcagaagtacgtacccgagtttcataatctttcgcggcaatggaaagatctggctcccaatatgaacaagcgggactgcactaagcgatcgacgccgtcaatttccagcccaccacaacactcctctttgcggttacaacgcactctctctaagtggagggcatgcccgtctatcttctggagactcagtaagtgcccgtttatcggggaaagcctcccataaggaagtgtggtggcggatcgaacggattacaacttccttttcatggactaaaccgtcagcttgaccggggtgcttggatcctccacccgtttcgccatcgacacaacggatgtgcaattcaaattcggaataagagtgaacaagtggtgagagattatgacaatcgcacgggagcttcaaaatcaggatcgggcttcggcggtcagaggaaacgtaagcatcttcaggggccatggaaggtattcgaaactcggagcgtgatcggcaagagcgagcgattgtcgactctcttatagaaagcctggagggtcttgagccgcgtcgagtcgacgagacgtaacgcgatacatctggggaatcgaactgacgagaaacaagacacgaacgagtgcgttgttcagctctcgtgtcatcaagaatgcatctctaagagtcatcctaaactgagggaatgctctcaagtccatgagccaaaaccagaagtccacctccgctgtgtttactgaacctggaggggaagccatccctcgacagtgtcagaggacggtagtggagcagcggcaccgaacatggctgactgccgtcaacacaaatggatctcttcgattgagttcattggcttttggcagccgatcgatgaacggacgacattgcccaaaccgagtgtccggagatgaatcagagcgtcaaccaatcgaaacggggcgtaaacaccaattccacagaagaaagtgattccccatgcccgctccgctgattgaagcagtagctccacagaaaccgctgtgatgttggacaatgttttgatccagcaaggatcgtatcgtcgctcgaacgtatcaaactcttacctcatcgcataggggcggtcctacatcgaatggacttagatcttcatcgctgatctcatgatactcgtgcctcatgggcggtgggtttccgaagctgacaggtgcaactctctgaaccgcaggcggggtttggctttcgtcggtgaccgactgccgcaacaagggcgtcatgtccgagcttgaatctctctggggccggcggggcttcgatttcctgaagggctcccctttatcgaaaggaggagcgttgggttgggagtgaatgactgatgcatgctcctcgggcggtacggtcgcagatgcagggaagtagccaacggtgcccagacagaatcctcgccacacttcgggcgtgctcttgtcaagaaccacgatgatgtcccctctccgaaactccaacgagtctcggatctgacgcgaagcgttctgggagtccgtgtgtgcttgcacctgctcaggcatcgacgaattcagcagaccgatcagctggtggaaagtcggtctgtgcgatgtgtcgtgagcccagcatttgagcatgaggctgtaagtgtccctcggacacgcgtcgggtcgttccagtcgctggtaattgggttcgtcaatagcgttgagaatctgctgaccgttgtagtcctgccagggctgagctccgaagctgaacatctcccagagagtgactccgaacgcccagacgtcgctggccgatgtgaacttcaagaaattgatgctttctggggcgcaccaagctatcggcagctttagattctgactgaaattcgtctgatagtaatctttgccgacacctagggctctggagagcccgaagtcgctgattttcaccagatcccgggcgaaaacaagcacgttccgggcggctagatctctgtgtatcatccgtctgctttctagatatgccatgccttccgctatctggatcgcgtagattgacagtattcgtgggcaagtgtctttcgcgaaaacgggttctttcaagcattccagcagtgacttgtacggagccagttccgtgacgagcatcagatcttgacccccgtgtacgactccgtacagcttgactatgttcggatgtgagatactgtgcatgatcgccgcctcggccaagaagtccgaggcattcgattggaatcgtacccgagacaagcatttgaccgctacgttgacacgagtgccgaccggcgacatccagacacctgatcgaacgacgccgaattccccagatccgagggtttcgctgaggatgacgtgcgacctcggtatgaggtactgcggcccacttggttctgatggtggcgcaggcaggccgcaaacccggtcttgaaccgggagctgcttacccatgaggaactgtcggatttttccgaggtagccattggagaaatgtttgtcgaagtgccgcttcagtctccgttgctcgaacttcgacattcccaactggttgtagtgccggtcctcgagaagtttcagttgatcggctgtcgtaacctggagctcgttccggaacggctcatagtactcactgagcttcgcctccaccagcagttcgtacagagtcagcgggatgtgttctccagccagagccattttcccgtcgacgaagatccagatcacatcactgctttcggtcagggagtcatcctggcgattcgtcaatctgtgagcagtctccgatcgatcatgatgaccatgagcacaacatgaacaagccgcagaggaacctgtgatcaaactagcagacggtccggttcgcggtggttcaacacacagcagtccgtcttcatctgggaagctcttggtggagcggctacacaaaccaactctccaaccaaacagtcggtccgtgagtccctccaccagtcaggcgcaggcaggcggccggccgagcaaccagcgaaccactcatcaccaccaccaccataccgaagaactagccaagagcagcggcaccacgaccgaacgaaagtagaagactgacgagagcgccatctgccggcaacgacatgaagctcagtgacacgaaaacttagtaatcttcgtcacaaagcgtcttcgcggtgccgcgaatgcgttcctgagaagggaacacgcgcggttccgactcaccatcgatcgctccaacgtctccgcatatgcatatcgatcgggaacaatggtactgcccgctggtgtcgaacgccaatcagctcggtcgggacggcacttttttgcgatgtttcagaaaagcgttccgggatgagaaccagaggctccgttgaattggaaacgtgaaccagagcgaacacgcgatgtctgcgactgctgctccggtgccaagagccgcgagccttcacgcgtgcgagtgccggggttttgagggagaagagcatcaagggtcggatccgatatgcctctgtttcgatgacacgttcctttagttctggaggcgaagctccgaattcccacgactgcagcaagagaaattcccgcgccaatggctgtcgagcgcggcgcgctccagtaatgccctccgctgcgttccgctgtgccgagcccaggtctctcgccaaaatcgctcctgatgtaagcttttcgaaactccgacagaacgggcagcgccgacaaacgcgtccatcgccgtaacgaattgatagaatatgtcgctgctggaaagggctgcagctcgcaagtatcaagtccggcttttgagaccagtctcttgtgtatcgtccaagcgtcggatgcgggattcatgaatcacgcactcaattagaatttggacccgaaagcaaaacgacgagtgtacgatgtatttattccttcatggacgtatctaggcatactacttatcgaaggggaggatcctgactagggagtccgttgaatgcacgaactgaattgtgaacgggttcacaggagcgaggagggcctataacctgtcgcctctgctcatctataatagatacataaccatcacaatgatttagggagattttcacggccgtgagggtatccgtagagatccacgaagttttccgacggtccttgagaaacgagcgattgcggcccggaagtgtcgacgattttcgacgaaaactcccagctttgatcaccatagtaatcggagcctctccaggccacagctcaagagtttcacccttggcgtatcatctactcctcgccatactccaccaaacgtgttgcagggcgatcatctgttatgcgggcgatccggtagctgaaaccgacgcattgttcgaaagagcccctcgaatttcgtcgtttcaacgtagcaaactgatgtaacgtgtactaacttcgatgttatgaccggtctgtcatttccgccagcgatattgaatttctcggcctcaagattgcgtcgtcttgcgataatgctcaacgactgctgctccgactgtttcagcgcagctcctggagtatggggaagagtcttcagggctctcttaagatcgagagatggctcatccaatactcctcgctcttgctcaactcgtagagcttcaaacatatcgattgattcgagtcaacttacgcaaggtctccttgaggtctcccgagtctagattcattacctgagcaggcgaagcgtttgaggtctggcaaaaagcagcgacacagacagcgacgatcatctgaggaacaggagacgggggttggactcgaacgtggtccgatgaaattgttctgtgctctcttgcttgtataaggccgacgttacgtctttatagaagacggcgtggagcccagtggacgtaatagtcttggagggacgtcattatcgaggacacgttttcaattacatcgtcattagcaagattctggtgggccgattttccttcttcaactatgtttcatgtgagattgttcatcaagacgtcatcgttccgctgttcagccgtggagacaaccaaattgtgcctcgaatttggagtcggcacagaggtgaaactcgtatgggggatcaccgacggagattctggagactggcaaagacaatcgacgggcgatcccagacaccgcggcaggtatgacacgagaggccctcttccatctcaaaaccgcaaactatgcactaaatctcagctgtactcaccaacaaggttcgcatcttgtgatttagcgagagggatcgaacaaatgagtgtgaattgcattcatgctggtgaaaataaggcgaggaagaggaagacaggtgagaggataccgaggtcactggaaacgtactacacaacaaaatatgaggagataaggtagcttgaccctggtgtggcggtcgggagagacatcaaacgaatcattttggcggctgcacgctgcgacgtaatgttatgcgccgacgccctgacttctcaattcaatgccaccccgcagtactcagagaatgctccttcctaattctaaacgaggagactctgccggcggacgggtttcaggtcgttttcctcaagatggcagcgcttgagcctagaaattccgcggacccatgcaaactgaccttcctggcagtggtgtctcgtgaacgtgctctaatttcgctgcggtccaactcgagtgggaggaggttgcctcggagttcttttccgtcggattcagtattttcacgattccgggtccgattccggtaccaatggctcgtgcatgcttcgtcgacaaggcaattgatggataagtgatcttcgcgatggacggaaacggactgcgcattctcccctcatcggagagggatcgtcatagcttcgctggggcgctcgcattcaatcaagaaaacattaaaaatcgcagcttcgatcattgcaggcactctattcgccccatgcgtccaccatggtgaggcacggcactctgtgctccggagagatgaggcggtaccctcaagacctccaggagactcaagcagttccacgcgccgcgaccgacgaaacacgagagtcgttgctcaagtcgcctgattcacgtgagaccacagagcagaactcgaccgagctttcaaccgtcagaattgattccaatctcgatgaccttgccgtatggacgcaagaagatgttctgcattcgactcggtctcgaacttttcttgaacagccactcggagattactcaagaatctgtgagatgtgggctcagatcttcgcttgaagctctcggatacacccgactcatgttgaggagagggaggtcgccatgggaacacttccaatcatgagccataccgatcgcagcaacacgtcaacgacccacacctcccgaattctcctaatcgagctcgaggactgagggttcattgtaaaaacccctgttcgacatacaggtcgggattctcttcgctctcttttcttcctttcattacttcgtgaaaaatggattcggattatgctctttgctgacgatagctgggaggatggcgcgtgttttgtttcctcactcgtggttcctttggcgacttcaaaaacaagcccttttattcttggatgatagtctaggacctgaaggtcgaaagtgaaccgatcgagttcgtattggtctgattcaacgcacgcagggattcgattcgaagagaccgagaaggaggtcgaactcaattcaaagaggaaaaatgcatactccgaagctatcgaacaagaagaaaatcattccgatcggattagattcgactcaaaatatatgtacatactgtgcatgaaaatggaggattcgctttattgtatgaatattcgttcgcgcggggcaccattgttaccgcagcaccacggggctggggtgctggcaggatgcaggaccaagtttggcaaccttggcttaaatctccgatccgaccatacttcagcgacgctttgtgaactcttttggagtgcgtagacatcaattttcgaatctcgagaatcatattccgactcggaaaccattttccgattagacaactgattttccggtcagacatcggtcaaaggtactcgttgactagacgccgaagcatctgactcgtcgcagaagactcgaatttccaagattcgaaaattcatgtccaggtagatcccttcagctttaggactgggtttgcgatggttctgctgtaggtcttttggataatgttcctaaggaggtttcgggagaacggtttgagaaaggcgcggaggacctgatagctctcggagtcggtcgttctgatgtttcaggggagaccttatcattgacaagaggaaatgggagtgcgaaaaaaggaaaaacgacaatgggagacgataggagagccatatgagaaagaatattcattcgcgcaagacccatctggagtgtaggggccattccagctgggtcgggcgtgactcatatacacgatacccagtagaaaacctaaggttcatcatcttgaagatgcgagagggccgaggtttcgaagagtttgggattgtacgttgtgaggaagacatgagcgataagggcatttcatctttcatttttcgagggcgaaatgtacaaggggagaagttctggtcgaactgagcaggacaattggtgaatgattaacataataggggtgttgcttggcactacgtccggttacaccagtggttctcaaactccacagacccatcgaccccctaggcgacttcgttgaagtttatggactgccgtcccccaaggggtcgactgtcgacccttgatccacctacgcggagccaagaagtatggtcgaatccaccccggcatcacctctgtgaaccggagatcggctatcgaccactttgagaaccactgggttacacgaacggggccagtagagggagggactagagaagagctatctcaagatatgcatgtaaatatatctgattacgatggcctccgttaaatacagttcacatgtgactttggaatagcgccattgtgataagcttccctccccttccgttgaaggaaagaactttgtgtagaagggaggactgaagtgcagtggcgggtcaaggagtgactcaagggggggagaagggcggtcgtggattctgaatggagcttgagacttttcccctcgcttccaaaggtccccccggagaatcaggttccgattttcatagaatatatgaagataatagccgcagcggcagctacattttccagatttccaatcagctcaatgttaacagtgtcatatcaagttgtagtggatgctcaatcttgtctctgtctcgagggcctcccaaaccgtgacaagatcgaatttcgaagctcggtccccgccaaaaaggccacaatcgcgaggcggtgatttgtccctcgtttcagctcaatgcttcccgtcgtgaccatcgataatatacagaccgcagaggactgtcattcgattccgtgaaaagttttcggtttggctccgtttggatcgtctgcggtcagtactggaaaatcaagaaggaggaacacggagctctcttttccagctttctagtggacctttattttctcgactgaatccaattcggccgagttatggtttcaggaagccaatgaggaagagtctctagttaaggggccaccctgtgtcacctggaaaaagactaggggggcggccgtagctggaaatctggctgtgctcattgaagtttggaaatgcaaacctgacatcacttcagccctccggatggatcaattctttcctagactcggtttccttactcagcctgtgttggattccgcagattctgggacggaacagttgatcacggtagggaatgcatccatccttgaggggaagacggatctttactccaggatatcaatttggatctcgactggcctcagagagatgccgacaatagtgcaaagcggaggagaacgctgcccaacaggcagcgtcttccttgggcaactctccgaaattcatgtcagacttcgaagagcgcgaaattgggaagaggacaccggttatagtatatgccgaaccttatggcttaatcaacacagcagccaaacgagaccagttccacgggcttcggggattcaggcggctgactacatgacatttctgatcttgctaggtttcagccttagattatttttgggtgattatgttgaagttgtttcagagcggtgataaggtcattgcgccgattcctcgggctattgcatggttacctgagaatcaaaccgcaagcaaagcgttttcgcagtccgggagtcagtcgaatcgcatatctagatgaggacacagtatccggtcgacgagctggctttctgtctgccgaccgagcgaggtttcatttttgggaatttccatccgagccgtcggcacatgtagttctcgagcagacccgagaaacgaccccatcagacatgtgacctcgattgtctcctggtccgactcctgcgggcgcttttcgcaactgcgaaggaaaactcaccactgaagattgaacaagaaaacgatacgattggggttttcgatggcatggaggtgctttattcatggtttggaagcgaaaaacgatgatgactgatgcgaatccggagcgatacggcaccgtcgaccctccgatcgagcacctaccgtttcctgggcttgacgcaccgtctctttctagttgacatcctcacgcaatctttcgtttttatattaatttcgatcaaattggatcgcatcaccagaaacaagtggagagatggccaaactggtcagtctcgtccggtcagttgaaatactaaagtacgccaacatcgaccgcgctttctcccgtcccatacattcgtctttcaacttgcagccaatgataagtacccccaaggcgcacttcacacgcgcaagccacgttctgatgacccccatggatccgcagtgtgactgcgccaaatcgttggtgtctcgttctcctcaatctccagctcaatttgttgtgtattcgctttcaattatttcaataactactcgaggtggtcgattacagctttgtgcgagcatcgccgccagagtgtctacttttgctctttctcgagtttcagtcggagactctcgggcatctggggtggtggtgggcgaggaaggcggagccataccttgaccgcgtcgtaaatgaaccattgaagagcggtgagcgtaccaatcattatgatacgaggaaccaggcccttccaaaggcctgcgaatccgagtttcttggcaacatcgacagctgtcgatcccttgtcctggttgagtttggaaacgattgtgtcagctggatgcgacaccacggcgcagaaaactccagcgatgtatccagcggtgaacgtaacgaccaattgttcgcctttcgtacattgatcgcgaggcttggggacgacgtgtttgtagagaagttcgacggttcgctcgaagcaagcgaacttcatcatggtgtagggaatttgacgcatccagagtggtgtcagtcctttgtagaggccgccgattccttcttccttgaggatttgaggtagaactttcgacaggtacggggagcatccgggctgagtttggatacgcaccttgcacgcctcgagagggcagagggcgatatcggcaaagaattcggccgaggccgaagccgcaaggtaaagtgatgtacgccacaagtacgtgttttcctcaccgagcatgtcggcgtacaagatcttgaatacttcatagaatccgaattttcctgaaaaaagatatcagagtcagcggagtgatacgcggcgcggatgcatgtcgcacgactgatttgaaaatcattcgtggcctcagcccactaatcaggagcgaacaacacaggccacgggagggatctgctttatagcgatctatctcacatgactgttctctctaccaccctccttcgagcctgaggtcatttctatgacggtcacctgacgttcaatgacatagcccaatgacttccccgcaacctcatgatttcgtacggtaccctccgcactgcttctaagaagaatccggaattcgcgtgcagtcgatggagctaacgtgaatgttaaaaaccacgtgcgcgactcgacagcgcgttcgagaattaacccgtcctttttatggagcgtagaggggtcaaggagcattcctcatgatggggccatataggtaacacttaccgagaccctggagcgagtacccgatggcggtcggggcccaaccgcggccgagtccgcgaacaccttcttcagcgagggtgagcttgaagccctggaagatgttcttgtacttggcaccatttgtttggatgcgacatttgacgagatcgagcggggtcagtgccgtgtgggtgataccgcacgagaggatgccaccgacaccgcagagggcgtagtattgtccggagccatacggaacttcaccggcagtattggctgccgagatcattcggaccggcgccgaaggtgccgcagctgcatcgcatttggccacaggagttgcgaaaggcgaaacgaaccgccgctggccgtcttgcgatcggaaggctgagaacatgttccggctcgttcttggacaaacggcgctgtctgatccaatagaacaattaagctcacgacgtccccacgaccgacaccgcaactgactcgtcaaggaaaatggccgatgaaagtcaccccgttgtatggtgctcgcgtgtgagcggtcgtcgcagtcaccgcaactgagcgcgccaaatttaaacagagcgtgatgttgaaggagccgtggggtcctgagctatccacagaaagaaatgcgatctctcgggattctggagggaactagagagttcccgattgatacatttcagtacaatcggtgattctagtgcccggcatttcaatcgcgagatcgtgaatggcagagctcctccgcagggttcccaccaagctcctacctcccgctcaaggaggcacccatcctgggcatgctgatcacgatcaccgagataactgaacgtgttgagaatgagtcgatatcgagaaatccgacagagctcattgagaacatctttgccgatggaataaaaacccgcgagggttgatcgtggttcaccatcagctttgttattgttcgccatcgaatttcgtctgcacggggtgtctcttctcccagtgaagggtcattgcgtcgaatctttccaccgttcgccgtattattggagaaactccactatgccattccctggagccttgatacatacccctgtcaccgatttttcggctctagcagatcaaaaaacgcggaaacggcagtgtcgacccttggccatgcaatacgctaggtgccaggatgcttatgggttcccgcatcatgtcacgaaatgtcggtgagtgccattctagtcggtgggaacagtcaaggagccagatccagtcgacctggaagagtgacaacgagaacgctctcttccctagatcaatgaataatgatcgctacacgatcgtggaacggatagagaaacggttatctggtgaaagaagattaaggaggacttggaaaatgaaaaataatacacgttctcgtagctctagactccgatcttcgggtcggctggatcggaacagatctgtgtttctcgtaattcttacgatttcttttacagagacgagttcgaggacttggaggagtgctccagaggtcttttacaaaccgcccgcgccactgtaatcagacaccagcgtatgaaactgtaccaagagggaaagctggagcaacagtgagtttggagaagaaacggagcctgatgctcggatgagagcgtttcaagtcacggcgttgaatcttaacttacttgcaggttcatcgtacctccgccggactcgatttcccaggagcatggtgtcgatatgtaatttcataatgaagaagctgtatctccgcgagcaagtagaggggattcggatgctcgggaaactttacgacgtcaagatgcgttaatgttcttgcggttgccgaagaaaccgatattgtcttcgccgatacgaggttgagctagagattcggaatcaaaagtttttttgagaggataacgagaaacttctggctgaataaaaccaataggaaagaaggttgttggaagagagtgatttctctttaattctcgggtggttaaggatccacctccacgaagaatcgaagtcgggtacatattcatcctcgcgcctccaaatgtaccaactgcaaatgccgtgctgttggagccagaatggaactcgaatgaacgaactccatcctctccgaaatccaatccgaactcgcgtctccaattggaagcgtcggcgaacccgtagtctctggcaatccgggaccctagatgagctccgtcggagttttccttgcgcctgttgaatcgattttatcaatcagatcaacttccggctcgggttgccaatggtatgccgcaacggtctttcgattcagccgtgtccaggaccccaaaagacgaaaagatatttggagattgccttcactacgatcgctatcgatcttcagactgctttcctgatcgcagtaaacgagctgctttgaggaaagggtttattgaaacggaagtttttctcgaggaaccatctcacgatgtgagtccggggttgaaagacaagaaactattcgatactcagatcccataagcgaggatgagataagagtcgctgcgagtaacttttcaagcttcatccacgatcgagttgcgttgaaggaacccactccacatgtaattgtatcgtgatctggtcatatggatcgagtctgatgaacttggaagttttcttccgggcaacatatccgccatgtggatgacttctgattcatctctagttcttgtttgattcttgtggagagagttttccatcaggaacgtctgagtgaagcggagaactaacttgagctgcaagcggaccatcagaacggccaaacggggatcgattgttgaaaaacacaacacaggaatctcttcctgttatatagttattgctgcttgatcactgtggtcgaggtgaaatatatacactgtggttgaaggctcaaagtcagcaaggcactcctccagcctgccacacgtcgactgtgtcgcttggagaacgagcactttcttcgggaacctagcggtccataaatatatcttctccgtcagcccaatcaggatcttccatttcttgggaaggggtgtcgaaacctgtgctctgctcaactttgtctttgaaaatctggtggaaacgttcgaagaacaattctttggcatactcgtatagctgcacgtcgagatggttcgcttctcgaactgcgctttcaaacgttgagaacttcttggagtttttcagatagttggaaagacggttcaatctgtggtgaggctgtgtaaggaaatggagttcaaagacgctctcaaacatcttctgagaaatgtttgggaattctgacaagccaaaatacgccatacgatgaagattgctcttagcgctgtgcagaagtatcatgtcacgatggctctgaaagcgataagaactctgaatcaataaccggcaacctggattgtagaattgccagcataacggtatcaagtcggcgaaggaggagaagcgcgcagtgatagttcggactcgtgccggccgcgtgtcgaacatacacctaccgtgttgatgctcttatcataacaattcactagccggagatcggccagcattctcgtctggcgattgacagccaagttgtcttcacataaagcgaattcctcaagggtgacagtagcgggatcccgtccggcgaaacagttctgaacatcgggcagtgagtactcgtggcccccgcaaagatggcgtgacggtcgcgagcctttttgctcaacaaagtgctgccattcactccggaatcttcgaaccggatctcgaaggattgtcatgtacaaatacctgagcaatgaatatcgaatgaacttgagacctcattgacacatatcatggaatcagataatcgagccatagcgattgatgcggattaacgaaccggcgcttcactggtttccctttgagttcgtccaggacacggtcgacgcacccattcaactccgaccaatccgggtggaccccgcagcgccatcccgcactgagacgactgaatagccatggactatgagtaacgggatccagacaccgacattgcttcctgctacgatcaccaacaagaaattcacacgttatacagagcaaggagttcgcgaaagagcgtaataaatccgaacggatggtatgctctgatttcatttgaagcaagtaggtttgggatcagtccgtaggttcaatattcacctgggtctcttgatgcaaacgcagggtgggtccaggtcgagatcctctatgagatgcttctcgaagaaattcgctcccgcgttctggatttgaaggaagacgaggacgtctcttcctgactgcaaattgtagacggaatcgttcgtttgcatgtggtgttcactgcttacacgtcctctcgccctgaaagtcagagcgtgctccgaatgagattccactccgcgcccgaatcatcagcctatccagggtaccttctcatcacgaagcttacgactccgagaatcaatattctgagtccctacatttttttgccagcttatcagaagtttctgccaaaagaacgccagcagagggtactcgcccccgcgtacggggtttctgacatgtaacaaagtgtatatgggcaaggaatggttaataaaccaatcaatcaatcatcaatcaacgtctttagcgagaatacgatgactgcaggattactttacctcaactttatcattggacggttctgctcaaggagaaagccttgatataagttgccagcgagaagtccacaaaacacaaccgcgagcaagagtgaaatgaaaattttccgaaaactacatgaattcgacgtgaagttcctcggaggcttcgggctttcacccagaagaggtctctcgatgtaggagaccatttcggaagagtctccttgaagaataaacgatcacatcgcgcaatctcactggagggcttccagagccacagtcaaaaacaacaacactcctcacggaaaagagtttcagaatgtttacatcacggacctgccgctgctgcatgcagcaacaaaggctgtcgtcgaaacagaattccccgaagctgcgccacggggaggcctttaacgttctgcgacggcgccggggtgaaggagtgtgtgctctgccgcccttggagcaaaatggcgtcatttgccatccagcagcataaacgggtttccgagagtgttttgacgtgaatctggtatcgccgtctgaagcaggccaggcttacaccgacatatacaggtgagccatttttcaaaaaggtcttggcttcgaactttgttcggcctgatgcttcacgagtgttgctctgggagagatttgacaattcgttcgaatcgtatcccgacggtggtccaatgacaggatccggtgcgcgatgattgactcgctgtagttctttgtgcttccaaatgaggagagcattccgatggaatgagttattttccaaggatttgatgtgttaggcatttaaatctgccgaggaagctacctgccattatggtaaaaccgcgacggataagagagacctcagctcggaggggagacaatgcctgagggtcgtgacagcgaaggcgttgttggaatctgactttgaggagtgcaggcgaagcccaagttgagaagtcaacataggtctcctaacggaagattcatgacggcaaacaaggaagctcgactgcagcttggcacaagtagtgcgtgacaacccggctgaacaggagatcatgctcggggccagtccgtggtaaagcgtggaacttgcagctcatcgttgggaccgatttccaaccctccttgccatagacaagggggcagaactcgagggaagatggtgatgacatccaaaatatttctcgtggcagcgacggcctcgacagcggctgttatgttgaaattatgaattcgctacagagacagacggcacgttttatgtcaactgtcacgaagctgctccaccgctctggacagaatgtaacggaaagaccgaataccacaccggcattgttgagcgccgcgaactgcgagaaaaaaagaagcggacatcctgaatggctgggcgctccgctggattgacttcgtttttcggtgactggtcactttcgtcgctccgaaattatagcaagcagagctctgcaaggggattaagttgaggttccgttttttccctaccgtggccttgacggaactcaagatccgatggcaaccgaattcatcccgccctcgttgcaattctgctagtgaacggcagaggcatcgaggcttaagcatccaagttttccagcgcatgaacgctgagggtaactatcctaaatgagacgctaagcttccactggtcgtcagtgaagtctgtcgcgttgccgagcgtggtctgacagcgcttgcatgatttaaaagattctccgcctctggatatagtcaggctatcagccttgtcgatactgggaatgggccacgatagaggaaaatgtgttccccacaacatttcaatatattctcctcagttgttcggaaatctaggcttgctgagtcacgccggaattcagagcttcttctttaactatgtgatacgataccgcgatacacaaggtgcatcgactgctgaaaataaataggggatgaatgaattttatattcagttctcactgcagtcactggaaaccataggggaaagcgagtttgcgagtctacattgtcgagtttattattggaattcgatctttcgatgaagacacgcttctcggagcttacagtgtatatgtcatagctataataatcagcgttgctgattggggaatcgacgaagtccgacctatgagaacccgggaatgattctgatctttccttgtcggcagccgaatcgagcagccatgtccaagacatcctcgacatgagataagggtcccctttcaacagctagcctatgcgggtctctcggaaatggtctggggtacctcgcgagttctcgggaaattattctaattatatgtggacgacgtagctgctatcgatcgggttcttgtcaacgaccggacgcaacacgtcgctgttacagcatcaattcgagattacatttatccaattatggtctgcttttgcgaatcgatcaagtccgtaatttccagatatgggcggctcaacgaacagataaatgatgaaacaaatcagatacactgcgcttcctgttagcgggggcagagggcggcgatcacctcagcgtgagaaaacatgtatagcagctcggtgagttcagtgtctatttggagttttgccgtcgagatcacttgcgatgcgatgctcgtcgtagctcctagctcatcctaacaggatataaagtcttatgggacactctgaaggcactcccgtcttcttttttcaggtacactttggtggtgatgctgttttgggcatttttcatgctctactctcttcgggtcaatctgtccgtggcgattgttgcgatggtgaacctaacggctctcgaaaaaaatctgttgccaactgtcgatcctctactagaaacttgtccgagaaatacgagtatggcgaccagcggactgctgtcatcgaatcccgactacggcggcgcgttcgactgggacgaaaacactcagggtgggtgaggatcgggatggaaagcatggcccggattttgataacaagccataacaggtcccatttgtcttcacgaattggacagccttggctgtaatttgcagatgattgaaacgtgttattgatcaatgtgaatatcgttacaggaatgatcttgggcgcgttcttctatggatacgtcctgacgcaggtgccaggaggccggctcgcagaactcatcggtgctaaatggctcctgggatgcggcattttcgccacgtctcttctgtcaattatcacgcctggagccgcgcgtatctggggagcgcacggccttgtcctagtcagagtgatgcaggggctgttcgaaggtgtggtgttcccttcgtcgatggctctcctcagtcactgggctccgaaacatgaacgttcccgaatcatatcttacaatactatcgggacctccatgggaactgtggtcacgttgatggtgacaggtcagctctgttcgcacgagaacgggtggccgaacgttttctacctgttcggtggaattggttgtgtgtggttcgtcgtttgggccctcgtggttcatgagaagcccgaatcgcatccttggatctcaaagcaggagctcaactacattcagaagtcccggggttacatagctgcgcacaatgttgagcttccatggaaaaccatcctgacttctccggcggtgtggtcgttagcggtgactatattctgtggaaactacggcttctatttcctcctcatcgatttacccaactatctgagcggagtgctccactacaagatctcaaacaacggcttccagaacgctctcgttcatctttcgtgcagcttgagcatgctgctgctggcaccggtcgccgactccctgcggaagaaacgattgtgtcggacaacgaaaatacgcaaaatattccaagctgtcggtcttctcggaccggcggtctgtctgtctctagtgccttgggcgggatgcgatcacctgaaagtcatcactctcctcgtcactggcatgtctctctacgcgttcacggttggggggcaaaatcctatgcctctggacatggcgccgaatttcgccggcaccttgatgggtataaccaacggtttcgggaacctaagcggtatggcggcgcctctaataacaggctgggtgatccagcataacgacacgctggcgcagtggaggaagttgttcctcctggcgtcggccatctactcgttcggggcggtgcagtttgtggttttcgggtcggccgaactccagccgtgggcagcgccgtcgcccaatgagaaagaacttctcgaggaggagagcacgaacagtgatcaagaaacattgcatctgacctgagccaatgagccgaaatctgcatcaaatgcagttggagggttttcattgaccaagttgttataaaacggctcgcgataccgagcactctgcagaatgagcttccctgacgttgtggcgcgtgctgtcaagagacggattcgggagcttttttcctctgtgaccattttgatttatacacgttatcacttttacgttagcgataatgagaaggaaatgatggagtcattttgtgatattatatcaactctggatgcagcgcatcgatggaatatctgcaacctatcatactgaggacgtggtcgtaatttctgattctggtctcactgatgtcctcaggctcctccgaggtgttctgcggcggaagatgtgctgaccataaagctacctatgtacttcattttctgtatacacgaagtcgtctattatgtgtcgtgaccaaaatatgaccagcccaccaataaaatccagattatgctatggaactcttccggctctccttcaggacagcgtgcgaggactctttcaaaggtgatcatccattcagatctcagcagtgaattagggaatgagttgccaggactttttggatctttctatctagtggcctcgcgtccatcatgtctcagtcgacgatggaatcagacaatcgcccgagctctcatcatgctccaggccaagagcctgaattcgacgcggcaggaccagctttccgaggcaagggtgtggagaatgagagacgacaagcgttaaacccattttctattggaagtacccattcgaaacatgaattaacaccaacccgactgaaacttcgggcactctcaaatcctcacgatagtgtactccggaagggaggaaatagcctcgtgttcttcctcaatcgtctttatttcttatcaaaccatccagttccattgttttcattagaggacgtcgttttcaacttctgtgtatcgataattgctgtcagtgatgtatcaaatatgttagacacagagcgaaaaagaaggataataacccgaagaagcgctgggaacccgaccaccagccagttcttggggtcgattatctttggaggaattcttaccacaggctcgagggggattgcgggaaaggaaatatcgtactagttcatttcgcttggctcggcggagcgcgaacgcacctaatccagttcattcgcagccgtgatcgccgtactacaaatttgattgattgagatgttcgctgttacatctcatcattattgttttaaatatcattctcattattacgtaccgaacatctcttcattgttagtcggatattctgcttccgcgaacttctaacggctttgatgtgtctgttcctgacgcacatgttttgatttaaattcgaatgtgctaaacgagtgtgagacggtcaagttcaccgcatagcgatgactttcggcttcactgcgaaaagctatagaggcttatccatatttccggtcttggacggatcagcttgacgatcaagctgaagcgttggccttgtggagaaaatcgaaggtgaaatctgggatactggcagtgattatgtctctgctcgtgcaatatgttcgattgttactgtcgcgttttcgtcgttatcaccatcactacttccattatcactacggcagcacttaggtgatgagggaagataactcgtttactcgttctattggacttgatctccgcagtagtaataacaatgacaaagatgtatgcaaaaagtattggtgcaagtacaaaacgagaggttatcgttgaggaaagagttattagtattcaagcacaattacaaagatggatgagcttcgacacgcgcgcaataacacagagtataactctttgatttccacgcaatccggaaacaggactactgtggttccagctttttgaggaaaggacgggaagaggtttgacagcgaacgttgcctcaaccgctgaacatcgtcgctcgacgggggaattagacgaagttaccaaggaaagtgatgacaggtcagatgatcgtcgtggtagaaatgagggtattacgtaatgttgtgctagagctcaactttgattttctcactcggcccacgcggagcgggtgaactgtactcccagcggacgcgcgcagtgagcaccgctctctacaaatgcagtatgaaagtcatacgtgttgaacacctgacacgatgcgcaccacgctgctctttgggcaggagagcagccttttaggctgcggttcagctcgttgaattctctcgtaaacgatgcggtgatggatgaggttgatggatactaaacgatgaatcattcaaacggcgactgtgtgtctcctaagttagtcgttcgcgtgatggtttattctctttgtcgaggggtaacaagcgctaggcgtcaggagaagccttccggtgaacgactattgtaccgcgccgcttcattcactatcggtgtcttcaccgtcgcgaatgaaggaaaactactgtttgtgcgtcgtagatcgagacgatgattcgctcgagtggtatgtgtaggcgctgtacgtctctgaagccgctgaaatggaacagttcgataagtggaggaatttccctgtctcacatggttcatcagaaagatcgccaggtcggagtcggacccagaccgaatgcagtttcgttcagagttcggtcgattccgagagccactaagaggcagatggatgaatttaccgtatccttgtccgctgccttcctgctggctgacgctgtggctctcaatttgttcggtgtgctgtcgattgccatacttggcttttcgtagctgagctagtttttcacgagcgttctcgagttcacgctccttccggaggatttcttcgcgggcaacgatctcttgggcgatgccgccgaccatgcgtttgttgatgaccagctggaattcctccgtctgttctacggactgcctcgcagctcggacgaggctttcggtggcttgcttgacggcatttccagcggcctgaagcctcttcatggtcggggagtcgggcgatgacttgactttgcatgccaccagcagctgagcagttgagctcgcgactgaaaagcggatagcgtgttaggtgacgatgtccgaaccggtgattccgggaatgcggaccgaggccccgttcgcacgcccaccttgcttagcagaagagatgagcttctcttccgaagcctctccgtgcacgagtgcgttggccgcctcgacgagactatgcgtcgcggctgccacgagccgtgctgccgaaatgaggccctcggaccattggccatcttccgaatggtaacgcggttgaccgctgaccattcctgctgcaacaagttctcgctgagccatcgcagctgctttgatcaaagcagccgtggcagctgtgatggatttggcagcttcaagaatgagcgcgtcgaagttcaagttttcgtcggcaacctggaatgagcgggaagcgttatcaaccgtggctgcgcgggacctacaacacacggcgggaactcgtctgtaccctgtcgcggtcgagatctctcgcgacgaggtccccccatcggccagatctgacacttggatttgaaacacaactccgagcggcaagcttttaatctgaggttgtttttgcgcgggtctggagcgagctcttctgcagcgcacgtaggcggtcacatgatcttctgacactagacccttcagcccttcgttcggtacgcacgcacacccacactcacttacgagaacagacttcaacacgatccattcacgagcaactagggtagagtgcgggactttcgctggtctccactgagagaattcacatcgcaaagcaccgtctacgtttcctcgagcgtatccaccgcatcatcagcacaaaagagtggtggaacaactgcaccgcgaacttgagagaatattcctctcgtcgactcgaagtatgtttgtgtccaatgttagcgctgttgctgctagcagcatcggagtgtctctctgactgactgacggacggactgactgacacgataggagcgacgcgcgcatcagaaaagaccttggccgtcggcaacaccagccttctccggaaacggcctgattcatgactacgttcagcgagaatacatccaagacaactacgactacagcgttgtcatcgacgctgtgtctaaccgacacaacagagcgtggccgtgtgacgattcctcgagccttacctgaacagtaatttccctcggccggagattggccagcttctgagctgctgcttcaatcgaggcagctgcaccgagaagctcagtctcggcgattacagtgggatcctcgggatcgatgaagtcgttacccttgagagcttcagcggcgctgacgatttcggcaacagcggtcgctatggcgcgggatccctcgaccaagcgctgtttcccgtcggccggtcgactttccagcacctgcagtagcagctgtagctgctcgcgatatcggattgcacaatctcgaccggatttgagaacccgagccctgagctcggggttgtcggccagcagcgaagcagcctagacgagggcggaacgttcggttcgtgaataaatcaagactgagcaacatcgagctccggattccgaattcacccaaaccgcactcaccttgcatgtctggagcatatcggcgatggcttttcgacccatattggcggaaacgatggcatcgtcctgcttgcaagacgtgccggcaacaacggccttcgcagtagcgatggtcacgggtttcgtggacctcacgagtgcttcgggagtcacttcgggaagtccactgaagttttgactgtcgaaattcttgatttcttggtagacggcttcgctcgtcgactcgagggccctcgtgccacgtgaattctcgtcttcgattgcacgaaccgtcttcagcagcgaagtcacgttcgtcaccatcatctgcaagaccacatcgttgaccaccaagtacttccggagaagaagaattcctccaccaagaattcccctcctcgttctcctctcctcctcctcctatcgctgtcgagcacatctaacggtttcgaaagtcgttccaaggattcgtgaaactacgatgcaacctctaatggagggaacaaaataccagaacagcagagacgggggcaatacacatagcaacaatacgaaaacgccgcgcatcatagaaaagcagagcgaaagattcgaaagcatctccatcggcatggaagctcggcaatccactgatattactttcgctgctcatctagaaatatgttcttttcgccggcattgtctcctccgtttgcgcgtctaccaccaacagctaaaaccgttcgaaagagattcggggtgacagataatcgcacaagcagcgcgaatggaaatactaccttagcagagtccttaaggtaaagcatggacggatcgttaatattctttccagaagccactttcgtagcttggatcaagtcacccagagctagggccacatccttgacggcgttgagcagcataacctaaaatagaaccgaccccgcgtgaatcaacattgaaaccaaatgcgtcaagctggttctgttggtgtttgggactcagcagcagaaatcttatgaatcgcagagttcaggccccgtttaggttattttgacgcccgaacgtcgccggcaagtccgactcctcgagtttcacacacaaacacttgctggcagcatttcactcttcattcacccgactcgggcttgttatcagtcagcaaatctcagaaagttagttgcgacgatcccggcggtcattctgcgccccggaaaagaggggtcggaacctcacctgcgcttcttggttctggggtccgagcgaagcggctccttgtttgagaacgtccgccaagtgcacgatcgtctgaaccgcgttctgggcggcgacagcgagctgctcttggctggaagccgctcctgcgaccagggtcttggtatcgtcaaccagggccttggcggtcctcaggatgctttcgcggtggtcgccgaacttgtctccgtcgtgctccggattcagtgagccggccgtcgcaaacattatcgtcgtgtcgaggtcgccaatgatcccgctcacagtggaagcagcgttgatgcacgcctgcgttcccgtcgagccggctttgagggcgcccaggatgacggacaccttctccgaaacggctttcgccgagtcagccagctcccgttgggcgtgcgaatctcccggattagcttgcgctgttccgcaggacttactcagagtgacgcacgacttgccgagctcgtgcactcccatccggatgcgataggcaagctgcggaaaaaacgtcgttcttagcctacgtgtgtcggatcgagcgccgacggctgatccactgctctcgactttccgtggattagcgaatccgctctaaatcgggggcgggttcctcgttggcgagggttccgcggtccgagtcgagctcgtggagtgagtgactcacctcactgttggaagtgacggaaatcgcggttctgcttatcgtgacaagggtggcatagtgatggctaagctcgttggcgagatgcgaaagctgacgcggatcgctggatgacttgatcaccatatcttgagagactcgagcgatctccttggcgttcttgaccatttccgtttgtacatcagcgaaggaaatttcgtgctgggtcacaaccacgggttggtcgagctgcgcgatcgcgttgttcaggttttctaggactccgctcacgaacccggcttcagcggccgatctttcgagcgtttggagaagatcgttctgaaaggagcaacggagcacaacgctcgagtgaacggacggattagttagcgtgagaataaacgactgccgggagcccggagccgagacccgtttcgcacaggagttccctactcaccacagcgtccttggtggcatcagcgccctcgtcgatgtcgttgtgcagcatgtcgggcgctttagggtttccgccgcattctttcgacgtgtagaggaattgcacggcggcctcgcaaacggttttggcctggtcgatgagcagcatctgttgcttgttgctcatgatgcgtccagatgcttctacagtgttctggacgagggtgttgaagtaggagactagttggattacgcagtggccgagttgttcggcttggcatttggcggcgacgcgcaacggttccaggctctgctgaatggcctggcaggagtgttcgatctgttcctggcaggtgcggaggtcgtgttgaggcgagggcagggatcccgtctggcccaggatggcgatggacgcctggtcgagggtcctgatgcagccgttcagcttttcgatgccctggtcgcattcccgctgtccgggagcgctctccttgataacggtcacgagtttcttgatcgagtcggaaactgttcggctctcgttcgagaagccctgccacacgggaggatctttcgggtttatggcgaggtctttcgagtggctgatgaggttgcacgagccggacacgatgttgcgagcggtgccgaggatgggctgctgcgctaggacggccttgtccgagagacgggcgggaaccgtcgcgaactcgggagaactagcgaaggccgtcaagttctccaccgctgcgatgagcggtctggtcgcctgattgcaaatcctcctgttcgcgtcggtgggatccttgtcgagggctttgattccactgacgagagccgacgtagctccggcgacgtctttcgcgctctgcatgaactggttcttggtgacggggttgctggccttcgccgaggccatacggcaggcattacatagggaagacgtatgcttggcaatgaccgtcgcggcgctgatgacctgctgttgcgaactgtggtggctggtgagttgggcgcacgcctcttcgatcgcgtgcagggctctggcgaactgcgcggcgtcggccacccccgcacgaccggcgacagagctcgggtccgaggctccgatgaggtaggcggcctgggccgaggcttcgatgaggccgcaaacggcggcgcatgtcctcttgaccgcggcgcagaaggcttcgtgctgactacgcttggcagtgtcggtgatgccggccattccgtcgccgagcatcttgctcttgtccatgatgacgtcgaggcattcgtaatagctgaggtccgaaatgggttcgttggcctgttccaggtgagtcttggcgctctggatcgcgcgaatcgcgttgtcgcattcggtctggccgggggccgacgacgagcaaacctcgatcaactggttgatggaatcgaccacggcccgacccgctgcgatcagctggttcttggcggaggcggacgggtcggcggccgtggacttcgaaacgacgaggagcttcgaagacgagatcgagacgttgcgcagcgcgttcgtgattcgcggatgaacttcggtgttctgcgtttggccggcgagctggaggccgacgtcgaacaagctgttgaagtccgagccgaagcggcgcacagacgcggtgagtttcgacgacgacgccctggcggactccaccacgttgtcggtcgacttgtggaggcgctccgccgcgttgtgtaggtccgactggaggtcgccgtaggtccggctgctgagcgggtacgagccctcgttcagggtttgggtggattcggtgatggcggtgatcgtgtcgtcgacggccttctgtccgggcaggatgctgatgcagctggtgagcgaggtcgacacctgcttcccgacctgggtcagccgttgctggttgtcggggttgtgggggttgctgacgacgtcctgcgaggccgtgatgagatctctggcgcgcatgaccaccacggccgcgttgtcgatcacgctgagctgcgactccggctcgtcactgcaggcggccactcctcgaacggccgacacgaaatccttgagggcgttggccgtgtctcgggccgccacgagaaggtagtccttgtcgccctgcgaggcggcggtgaggatctgggccaacgacgagccgacgactttcgacgtggcgcccagtttgagcgagcacatctctgtgttctcgcccggcaacggtcggaggtcgtgcatctgagaagcgtgacgatactcccggaggtctcgctggagtccgtcgatggtggaaatcggtccggaaagatcttcaaccttctggccgcacacggtcttggccttggtcacccaggttcgcagctcggtcagcgtcgaagtcatctccatggctcgggtgtgcagcagctgggacgtcgtcgtttcggtgatggtggcggcgagtttcttcgaggttgaagccatcgcttcacacggtctggtcatgtcttcacacgcatagatcagctccagatgtgagtcgagggccgatgaagtctgagtggccttaacgccttgggtaaccctgggtagaatgccctcgacttcacgcacttgctccgtcaactgtcggcccaactgttcgttcgaagactgcggcaccgcgctgtgagcggccgagatgttctgacgggcggccgctgcggtctgcttggcggttgtctgtggaaacaagaagcgagtttcagagagacgtcggaacttctcggaagacgaaatgcgaaccgccggactcggtgagcaaatgtctgctcgatcgagaactgataaaccattcgattgactgaggaacgaccaatggaccgcccccactgacgacggatgatgaaatgagggatagttcccgccaaaatgatgaatacgaagaatacacccaacatttgggaatctgtcccgcgcgacgaatccgtcacactgatagcgaactcacctcaagcctttgaatgacccgccgttggaccgcgttcccgctggcagcgtccgtggcaacgcggatgtcctccgcagccttccggagcatggcctgcgattcgcaatcgttaggtttcccggcgcaacccttggcggcctcgatcatgcgggccgtcgcatcggcgagaaccttcgccgcttggagaagcttcttctgctgtccgatgtcggtctgctgttgggcgtcgcccttgatgccctggatgagttgggcggttgccgacgcgagaattttcgcctgtctaaccatctcggtggcgtctccgctcgaatcgaaaagacggtccgtcgcatcgaggattgtggtaacgggacccgggtggccttcgcgggtttccttggcccggacgctgatgtccttcacctggctcaacaggtcctgcagggagttggccacttggcgagcggcgtccttcaggctctgcaggagcttcgggtcgtcggtggcatcttgacaaacgaacacgatgttgtccacagtcctcgacacttccctgccggcactctcgagctcggtttggcacgcagcgtcggcgatggtgggcgcgagcactttcgtgctggagacgagctgcgaagtggcgagagctccctgagtggcggcctggacgattcggttctggagttcctggtccgtggtctgactggcgacgtccttcgctttgaggacgagagccgcggcggcgttcgcgacgcccttcgcgagggctaggagcagctcggcggtttgggtgtcccactcgggctcctcggcgatggtgtgcaacacggctctcgtcttctcggcgacgtctgcggcggccacgatgagtttctgcggctgcgggggtccgaccggttcggctgcgttgaggagatcgctgaaggccttgcacatttttcgggcggcgtcgatgagatcgccgcggtcccgatcgtcctcaatcagagttgccatcgtggcaacgtgcttcgtcatctcgggcagcgtggtggtgctgcaagagaagagtcgtgaggaagtgagacgaggtgtcaggaaggcttccttcgtgggatccggaaacgttgccggattatgggttactccggaagaaaaaaaaactcacatgacgttgatcgccttggacacggccgggggatccatctcggcttgggaggcgagggtgacaacatgcgcggtcgcggcgttcatggccgcgatgtgcgtctggatattctgtttgtgggtgtccagttgacattctttccattttttggcaccggggtccttgcccaagtcaacgtagacgatcggcctgttcaggtggtcgaaggatttcttgatagcttctgtgatgatcgcttgctgaggagactcgatcaaggtcgcgacgtgcgcttgttgaggcggctgaaaggaacatgagtcatcgatgatggctgaccgacgtcgaaactccccagatatttagacaaccggtttcgtgttttagcgctaaagtgtgcgctatgcttcggttcggcgcgattcggttaatgcttgctcgcacacggccccgtgggtccctgcgatcgatggtgaacgcaagcaatgtagaggaaaataatcgaacccgaaaaactcacaatttgtactcgctggccttgagccagggtcccggtttccgtcttgtgcttcgagacaggaacgtggccagggagaccaatcttctccgattcgggactcggccggacaaccgaaggaatcgcgatgttctgggtttcgaactgaaccggttggagagcgggcgagagctggatggtacttgcttttgccggcgatacggagtcttcgacgattttagagccatcgtcgccctgaataccaatatgatccttggccttctgtctcttgaggattatatcgatatatcctgcgatcaaacgagcgatctgctctccttcccgggttttgacagagtagaacgagtcggaatagtcgccgaagtcgaatgtgaaactgttcggggacgcggcccactgtttcacggctgagagcggccaaactttgataatctctttcgtgtgctcgtctaaacgcatcaccgactccttcgtgatgcccagcaagcgagggacgagtttgtttttgcctttcatcttctccttcacgaggaagaacgtcaccccgtacgttttcagagatcgcgctctctgaacatagctgaccttggcgtcgacctggctcaggccggtgtacgttttatgacactgaaacaggaaggaaacattagaggagcctatattgaaatcgggtcaaagcgcgcagatgaactcgagctattcttgaaatcgagtgaaatataccgtcgacggtactcgactcctcttgcggcgagcttcgagggcacgaatccattgagctcacaaagatatagtgtgggacacgccacgaaagattcgtcggaggaaacaatgctcttatcgagcactcccaagcattgtgatcgcgccgtagaaatggcgctgggccagttcttgactcgaacggcggcgcgggaggccaatcgagtgccgttcctcgcttctcttcataaatcttgtttgctgccgaaaatttcgttccatcagagcgtttctctcaagaaaacgcgagtcggagacgtacaatgagtgcctccttgactatgacttcccgaactaacaacgagaagtgtgcactaacgccgcgtgatgggatgcgccgtttcgtctcttttgtggacattcctggtgggtatggtccctcggcgaggccttagctcccggggcccttcccggacttgcaacgcccacccctccctcgggccggcttttggccgacagccagactgtcgccaagcccatgtggcgtctatctcaacgaacacagggaataacgggaccgaccgaccgaccgccctggagctcttcgagtttagctctcgggctgagatggtcttcgatagcgggaatcgcagctattgggacggtgttcaaaagctcacgacagattgacgatcgcgcgcaataaagcggaaacaagactcttgaataatctggacgctcggcacgttactccttcaggaaattgatcgatacgtggctcccgatctgctccctgaatgccgatcggctgtttgtctcagtaggcgagccgactagctgtttcgttcactcgtttgttcgttatggtttcgtggtaaagcccaaaaacgtcagtggtctgtctattgtgctaaaaggttgagccgaaggccactccacccttcctgctgtggtgttattcttcggggaaatacgagctatatcacgcttagtcagaaacctcgcacgtaacaacttcgttcggtttggaccggcggctgcagatccgctcatcgggttcggaaatctggactttgaaatatccatgatctcattttggccaacgtaaggaacgagtcgagaccgagatgagctcggtcggcctccgacttggagttcaagggattctccaacttgaggccgtaatgactcaatcctctggagagttcttcagattcggcgaactaggacgtccgagttccacattttggatcaactcgtaaaaaagttcagtttccagggaacccgcagtcatttggtcttgtgagagtcacgacaaatgccatggctcgagatcactacccaaacgctccgggacatagttcagtccaactcacggaattctcacaactcggggtatgagcaaaatgagcagaaatcgcttgcacccaatgtttgtcttaaagcaataactgagcagatcggacacccacgcgtcccaaacacgtttgccgacctgagagttaaacttctcgctgaccatcctattattctttccctaatttttattcccggctttgtccgcgatgctcagctggcaggctaaagtgaatgtttgcctagccggttattttgctgcttggtcggttggccagctggctggttcttcaaagcaccccacgcaccaatatccgggttagagagacaaacaccgcgttggtgatctccctagaggctgcaagctagaatcgtgggaggttgccaaccctggtttcactctgtttggcacctagaaggccgtcgtctcaatgggtcaccccttcgggacgccaccatatgcatttccgaagcaatttctcaaacaacagtagaccgtggcagtcctgagatgaatattttttcttgacatttcatggcattcaacgtcccatacgaagcatgaccaatacacccgagcccgccccggtgagcgctcgctagtttttgctcattattgagaaccgagcggaaactacggctgactgtcggggcacaaagtaagcgatgttattgcctgggtgaaaccgatggtgaggaagtctgcacgaaagagttgtactcacgccgaaaactcgtctgtcgatcccttttattttggtgaaggctttcgggagaaactccttgaggtcgatgaagccggctttgtgttttccttcaacgtaattaccgaattgaatttggcactggagtccggcgaactcgcatgcttcgtccaccgtgacggggtgggtcgtgttaagtatcgcgtctctcgcctgcacgtatatcagattgagctgcacaggatccctcgaatcgacgtttgagtcgctgaagaaatatttccgtcgtaacgtcaacgtttccttttcggtgatgccaagctctcgaagcgtcttgcagtgatcaacctgagccggaagaaaaaaaaaacccgtttgaaactccacagtctaacacttccgagcaatggcacgaggtctctctcttcgctcgaactgctctcacgggacatcgaaaacgagctcaaaatcaaactagatcttgattttgcagcagaccccggtgaagaggtcgagtttgagaggcatttatttcgtggggaacacgaggtagaggagcatacccaattgaggtcgtcgtcggttttgagtttcttcttcaacgtctgcattttgtcctttcgtctgagtgtcagcgtgcccgtcttctctttttctatgagttcgtcctcgcggggttctttcggtacgtcacgcaccagcgaaaactcgtcatggttcgtaataccttggaatggaataccgaatttaggatgggtgcaacgctgaactcgaatcgatcaacccagagaagagcaaaaaagcttccactcaaagtcaccgagcgaccgagccaagttaccgaggaatgcctaatcgaaatacttcctccgatagtggaggtagggaacagaaacaggaaggccatgagacatctgtgataggaggctactctctgatgagccccgtgattgccgggtaccttccgcaagagttcaaaacagacgagcgtgcccttcaatgggacacaatatcgtatgatgagagcaagcccctcgaaagacgctaagcgtcactcgtgttcttgctagcaacggtggtttcccgtgtcccgatacggcgagacaattgattcttgtattgttttgcggctgtggtgacaaattttcgttgatttatgctagacagactcggtcaggcttccggtttccgggttttctcatggctactctctgatgttcaccagagagagagagagagagagagctagcgagcgagcgaggtgctcgccggccagcgggcaaggaggcaacttggttggtggttcggaacctggctgcgggaaggcgcagagtccaacaggaaaccaccaagcagcgcccaacgtcagcacaaagtgccagagagagttatccgtcgattcccggacctctttctgcaagaattcgaatgaactggagctcgacagagacagtgaactgaatttctttgacttgaaaacgctcggagcgaataaactattcctatcagctacaggtggcgccacttccgcggagaaaaaaactcgcgagaactgaactctaccatcaaaatcctccatgggtcggctcggctcaagaaatccaaggcaacttgaatcgtgaggcgttcgccgacgcggacctttgattattagtgctcgagccggattctcggcagcgaaagtccagccgaatctcgaacatcgaatattcttggaaactgacatttgggttaattggagcatgacgagagtattccctgctgactgggtaagtagctgaactttcagctgatccatgtgctagctcgcacatgtgcagagcctttagatccgcgagagttcagtctctgtgtctctgtgagcgcgaggcgtttccaggcccaatcttgccatccgtcgtctacttggccagtttcacgggtctgtctttatttatttactcgggcacgtgggtggttcttctctgagcgcgcgtgagcttggccaactgcggatgagtgagcatgagctcgagtgtttctaccggactttgttagaggaatcacgactgccggtcggaagaacatcaccgcaagcggaatgaaaatgaagagaaagctgtgtataccgattttcgaacagatcacgaccatcatgttggccaccggctgtgagtcatcgaccagaacggtcttcgtagttccatccagtaaacgaattcggaggttccgcatcttcttgcggtactctagcaagtcctgaaaaaaaaattgaaaatatcagtgaaattcgaagtagaatttcatcaatttaaaatagccgtttcccgaagttttctcgtccaatgaaaactgcgagacgagaacgtcacggaaggcagcggttcagaggcgtttcctttttcgtctagaattctcgactgcaggcgatctcgaagcagctctcaaaatcactaaaattatgtttccattgtgggaatcaccgtggaggctcaaggatcgggatctggtgcgcatctgtgacggaactgagtccagagagagagagagaggagggagaatcgccagaccctgtttcgatagtcgtcgctgccccatctcgagatcctttatgtaggtcagagagtcgacgagacttattctcaatgagaacggatgacagtggtgtccgtcggccgagatgaattacgtggccccttcaatggcttccagccaggttgtaaaatgcgtcggttagcgtcggaacgacaggaggaagaaaagaggagaggaacaagcgacaggtgtcgcctgcattatccggaatcgacgtgagcacgaccgcagtgtttgagtaaatgacccgggatgagaaattttatcaacttccatttgagaaacggattttcactaccgcatcacgacccgagccgttccacccgttaggagcctcctccgggatttcagcggtcgttctgatccagcgcagccgaggaacaagaggctgaatggaataaaagagaacactggcggccgatgggacggggatatatcatgcccgcacccgaaaacgagaaaacattcttcgtccggagccagctagccgaagccagctagcgcttgatggctttcaatactttgagagcagtttacttaaggtccaaggtcacattgactgactgcatcggttcttcaaacccgcttcctggcccgcgaagagcgtgtccgctccgagcgctcgctgtatcgactcaaagaatgtctgaacctggaagcctcgactcgccgatgcctgaaactcatgaatccctcggaccggaatgatcccctcgagttcgattctatttcatcacacccgcggcccgccgaaaagttctcgatcgatcggattaatcgcaacgtgtcggaataatatcacgtggtccgctcaccccggttttgaggagatagtatccgagcgatttgctgttctcgagccatactccgccttttttcggatcttcgttgaccaggaacaggccgtactctttcggatcgtcgagcttgctctcagggatcttttcccgaacgatcctgcaggcgtcgaagatttggatgttcgggtcgaattggatggtcttcgtcgcgttcccttcgagcaccgccactttcagtgacaggctcgccatggctagactgaaaacgaaagaaacagatgagaatcagcgtgagggttcctccagtatttcctccatcatgcagagaattcagagaacgcaacacggcggcgaagctgtgtcgctgtgttgtcactggataacgtaaaatacggcgggctcgggaatggatcaaaacagcaaagaatcgttacagccctagactgaacagtgacccgcccgactcgacggcgtagtctcaaactatttcactggtatttgatatcaaaacagcgactctccgcggaagccgagccgaacacagagtagtgtcctctgtctctcctattcgacaaaactcgagaaagcatgagcttccgttgctctgcgacttcgagtccctgttccgatcatgagctgtattcgtcgattcgatcgaagccgagccctaaacgctggaagtttcagtctctggatgagagttcctggctcagcgtctaccctagaatacttcacgacatcttcgatagagtccaaactattccacaacctcgagtgattcaccatttttccgaatctcaaagcctcactgaagagtagcaactcacgccgtctcgtgtcccgctttgtcagacccgcccgatctgtttcagattgttgacaggtcagttctcatcgcaccggcttgatgggataaggaacgagcgatgaaagatcgtcgcgagcaacatgtgctcgaacacgattgataagaacgaagctcttcctgaagttcggatccagctgctgctgttggcgtcaaagaacgagacgttcgatcgaaaaagcgattgccttttacgctgcgatggccgacgaatgtgtcgacgacgaaggacagttcaaagaaatgacacccacgttcgagtgttgcgtggtacgactcaacaacgtcgagcaggatggaacggacaaacatccgctctttcagtccctcactcactcacacacgcatcaattagttattttcattcattctcgactgacacgcgctatcattcacgcgaaagggatcgggtgatagactgttggatacagagtcagacgacttctgccaagtgcagagtcttgaatttcgcggcattcgggagtctgtctcagtttcatcgaagagtgaactttctcaacaaaactgttcctcggaccgatttcgtagagggaggcaaatgaacttcggtgcgagggcgaattattctggaaaccgatcggatcttgagggagcttccgtgtggagcaataaggataccgccgaccgtcgttgaatggtggagatgagcgagattgctgcggtgcgtaatgcgctcgacacaaaaaaacgcaacgggaatcgccgaggccggagttccagttggagcatcgtccactatcctagtgcttcaagcacttcacaaatgtgcagctcttgaactacgtcttcgtgctcactttgagctgctgaggcaactcctcggaatgatcaatctacctccgtcacttgcgatcgagagtaccctgccgcagcataagttgcgaaaaatagaaagatgcgagtctcacagctcgcgttgctatcattgagaatctttatcaagaaggcaaatagaaatatctcgcacagattgcccatagtacggagaacgtatgaaatcctggtcatgtttgggtcgagcaactgcccacgcttggattactacggagatagttcctctgagctgagtgaataccggatgctcctgaagattcagatgcagtgatttcattcactcgtgttctgtccttcgacgctcgaataactcggtccccaggcgtctgaccagacaaataatcaagccaatgccctcgcatctgaatggactcgtcgacgcaccgagtacgttttcatgaacacacgaatcacgcacggaaccgacggcttctacctcgaatactttgagcggcgagactgagatggaaggccgttcaaaaatcgcagcggcggagaccgcctcttgttccgttttttgggactgctgttcgggggaaaagccggacggagctcagaggaatcccaccgaaaatctcaaatcgtgtatcgtactcactcgtgcctcatggtgcgtttcagctcacaagttgcccaaacaaagtttcacacgaattccattgcactgtgccgaggaaaaatcgtatgacccgaacgagatcctccccttctgccgctgaacgcacgcacgttgtcctcggcggttcgcaaaagctcagcgggggtctgccgaacgcataaaatggctatcgtatgactggcacaggttagccacgtgaccggtcggagaaaagcacacgttgaccgcgaaacaagtagaagccggcaatgctacgtcctcacagaaggcacaagatgagcacagcggtgagcacctatgacgagcctcatacacgacacaaaataatttaaatagttgaacgcagctcaatgcagcagaatcggatgacagcacacaatagaacgtggaagcgtgaagcagattgttgagacgactagtcttcacacaaggcccgtggtgcgtgggccctggtcgaggcggagggccaagcatgagagagcgccacgccgacagcaccaaatcggtcaactttcactacaagacactacactacggacttcgcggattcaaaccaaaacagggggactcctccgctaaaggagcttatcgttgcgggcgtatgattctacgaatgttgtctatcgaccgatttcgcataaggaaaccctagcgatgtcaacaacaataaaccgcaccaaccagggtcgagcgatccaccctggaagcgccacctcggcccaagagaatacatgttggcaccgagattcgaggtccgctgtctccaatcagatcgaataccttcgcagatatgacgagggtcaatcgctggaaacggaagcagatcgcggcatttgatggtacttcggaagatgatgctccgacagcctggctcaaatccgaggttctgaaactctcaggagccgatatctctctccactggggtttcttggtcaagcgtttcgaaaaggttcatggaggctctggggtcggaccaaagcttcaggttgatccgggcgatttcttcaaacttaagaccgctccatcgatacacgaccggttcgcgtttggcctggctatgcaacgttacatgggataccaatgatccattcatgggcacgagttactgttgcggtcagtccaccatccaggctggcctatgaggcggtcggtggcggcgagatccgtcggactgacgtgccgcagtttatgggagcccggatagagttatggagcgagatggctgactcgccagatgactgggttgcctggttttgacgttgacgtcgttactgacaccgccgccgtaaccgctatcaccgcatggcgttaagacgtgaaatggtggattctactgttattccaatgtgaactatgccccgattcaaacaacagcgcatacttgagatcgagagctcatgagcgtttcgcgatctccaagctgtgtggaaaaccgcttccgaagaaacttgtaatgtataaatagaaggagcaggtccgcgccaacagactgttgaagtcttcggaccataatctccgacaggactgtggtctcctataacgaccgcagcatctgtacgaggaaaggatgatgatatctcttcgcaaatccagtggcgctcatagagcgggaaacaaggtccataacgtcaaaagcaactatgtcgaagaatgtttcccatgccgggctggtgtcaagttgtctggcggcaggaagaatggaggaaaaaatgaagcgcccatttaacgcaattatcgactgccctcttcccctccgttctctgtcccattgaattgggcccgaatcacgttgctacaccatgcgacggctcgacgacgaacgacaatgctgcgcctgcttcgggaaacggaaacaaaatttacaacccagccaaacgatccgaaggcgtattcgctcatgacatgcattcgttcgatttttcgttcgactttcttccttgccggtcaaacgcgatttccgattatctcccggatccttttttacgttcgatgagaccccacgaccattcggctatcctctcggctccgttttccggccggacgaagattgaaaggtcccgaccctttagcatcgctacgagactttgaccgaacgtcaaggacggcgccgagcgctggcaacgatcttctctccctgtgtttcagcgctggagccacttccagacggtttaatatagcataaaacaacattaccaagggagcaactctcgatagagcgccgtgaccacagaggcaacgtcgatgaatgtcggtctaccacgtatagctggtgtcatctcttaccaagaagcgatgcccacttagtcatcgggcaacagcgcgatgacgtcatgcacaaacggccattccgatctcacgtcatagtgttccaaacagaaaaaaaaaatcccgccaacttctcctccatgacttctccgtttttggcgtccgatttttctttcgctggttttctcttcaatcaataattttttcatcgactccctactgcgattttcccgaccgtttgagagtttgccgcgttctggtcgaatcgcatttgccgccgtcgttgagcgcgttgtgtggaggcaggtgcagtcagcgacctcagaaacgtttccctccgccgtggcagtgcttgtctccggacgagacctctttccggtgttgacaatatatcccattttgacaacatgcgcgaagaataagaacattcccaagtttggcagagtcatctaacaaaggcgcggatgatatcgtgcacttggaagtgtgataagcgatcgttaatgtcggagcagaatgattggggatgaaacctcactcatttccattattcaagacgttcaaccccgcggatatcaaatttttcacttctaccctttctcgagtttcgccattcagaagaatcctgtttctgtttggaagaaaagcctgggacgaatacgggtcctcttatcaaacgaaggattttcacaccaagtcagatttctgcgttcgcaaggaagtcagatggtcgatcgccgaaccttcccttgtggcttctcggaggtctgcgtgacgcagacaatcggtggcgcgattctattcgaaacaagaatatccgctctgagaacagctccgaaagattggcaacggaagcttctctccatcgatgcttccatgatgaaaaagtacaatccggcttggtatcgttgagacccgggagggacttcaaatcatactcatcccaggcccggttccaagcggagcctgtatagtacgaaacctcgctgacttcaactgaagagagatccagcgccgggcatcaaataacatgacgactgactcttcccgtggatgttatcagttatcaccgatcacgatctgattatcgtgaaataactagtaagttgatgcggatgccacgatgttcagcgctgtttgatcacaatcgctgccgagtgtgctgcacccggggcttcacactgcgagcccctgcaagaagttgcgtttgacactgtacatgagtgcccaaataaacactctaggaaaagtactgatataaggcatggtcttcctccattaaaggtgaacagcgactttccccttgaggctacccacgcagataaacaaaacagccgcgagtcgctgctatatctcggctgttgagagcagcaccggcggcagccgcagcagactttcgcatcctgccgtagcgctgctctggtcttcttctttcctgctgctgccactgttagaactggcagagctagcgcacgacgacaacgacaacgatttccatcactatggcggccgccactgccgctgtggcgagacgggtcttccacgctcatcccatactacttctcggttcaagcaagcaaccaatggacgaacacgattcaggtctcgtcttcgccgccgcgccaggaagaagagaccagctcatagagtatggttaacaacggcgagcccgcgcgctcgtgttctacgcgcacttccttactgaaacacacgttcacaaactcccactatcaaccgtcatacacgagtgacggaagggagacattgcgttgatgttcacacgcgactaaacccggggagaaacgatccaggacaaatgaattttatgtcaaacactcagactgggggggggggagagcttggcacaggacccggcagcgtctccgagacagcctcctaccgcccctctctcgtcaattttcaaaaagcgcccacacgtgaccatgtccgtgctggttgtcggaaacggagactctcgaagtggtcactcgttgtactacagatacagctctggaagtgatagaactcttctgaggtctgaggagtcattgagtttcggagaaagaatgatcagcccatcacgttcggaaacttcgattcgagtttgctacaatctgaactttcttgacttcgcggaatgagattcgacatcgctacccatgtcctgataaactcgagaatacacactgccagcctcgtcaagcctcgtcaatctcccagaagagatggactggacaagatactctcttcatccagaagccctccgcagccttccgcccgtcctcaaggcaaggcctttcacaaggttttaagatcaagcatcgcgcttgagggacgaatctgtttgacgatttgggcaagctccatgataataatcatatccatgcatatctcgacgcagccgacttaactcgcgagggagctctattcgtcctgaccatcgggactaggaagttggaagagttcccagcgagttattctccacaagtcgatttgattcaattttgagtttttgattcaggatcagcagggcgttgtcagtgttcggcggtcgcgcttctgcgctgtccgctaacaatctaaacaaagacttcggtcacccagttccaacaaatcagggaagaaaagtagacagtcccgcctgggtccatctgcgtcggtcgatacgagtagaccatcgttatctccaggaaagtatcttatttttcattctcgctgatggctgtcaacagaatagccatcgtttccagaaaatggaatcagggtaaagtaaacaaagggaacgaatcaagagtcacgtgaccaaacttatagaaacttgttgctcacctcctgagcgtgtatccttctgtgttatcccgggcgccttcgaatcggctgacacttcatccaatgacaacgacagcgtctgtagtaagcttattggtcatcgcactttagctcctatccaatatcgaagcactatcggctcgtttccgtttaaaacgtcgttcccaacttcgttcaacaaccaatttgtcagcttgcatccagcgccaatttttccaaattctgaacggatagcttggagcaattgtctaaatcgacaacttggagaacttcactgtcttagcgactgagtattcgtctgccgtccgggcgcgaatctgcctggctgctgggagtaagcagcgctgttgctgctcgtcgtcgtcgacggtcggctagttctcttcttcacccactcgacatagccaaataaagactcacattggatgaacgcatttttcggaataacgccagagaccgcgcgctctgcgagtggcgccctcttgtgatgagctccatctcactcgctgcgcgatcttgcgaacggggaaccccatcatcacgctagagtttgttcgatcaggatgtccgacggatgaagccggcaccgtgaatccaagggatgcaagcgaagggcttggattcgtcgggctcgctggcagctgcaattggtttgctcgaaactgtgtcaaaatagagctcagcgataacgagttcgaagacatggccagggacaagtcgggaatctcagcgtcgggaacgacatcacttaattccataatgatttgatgatccagtgagcttgtgcttgctactgaaaggataacccaatgaagggggtctcggtttggacggaaggatttgatccccgatcgattccgaacggacactgatcgttctaatcatccataccaatctcgggcgcttccacgatctgtcatcatccatgagtctcttgaggccgttgtcctgggattcgctgctctgttacatgatttctcatactctccgatagcatatggggctgacggtgaggccgtacatgagcagtccaactttgaacagagttcctagaagcgaaaactacagcctggatatactcttcgtccatgaccttcccaatgatgttgagatgtcgtcgttctcctctcaatggagatcagagggagccgaatgagatgaatttgaaatttcccgctgggctgcccggagcataatttcgaatattccatacccgccattctctcatctgcggtcgacggtgaatgttgaagtacttccagactaccagtcagcgacgtcgcgcaagaaggctgccgcgacatggctcatggaataaggaaggagaagggtgggcagcagcgacgtacatctgaatggacgtgaaactacgacgtctacggaattccgtgggagggccaatgcgatttcaatgctgttgctggtcattgaacagaaatggaatcagcagcgcagtccatccctatagcgcgctgttatcggcgagttctgaggagatcgtgagttgcgagcgcgacgaaacgtcatgaaccatgatgcatcgctcgttcaaagtagctggggagagcaatcacgcaagaattcaactcatttgagttatgactcacttggtctcattccaatcgactcatccaatccgcaagaccgtgttcccttccgcgccggacttctgacaatcttcgcgacaaattgagtcgtaccttgatatggtaatcaaaatttccgaccaatatcgacatgttctgggggctttccagagctgaccttctgaaacctaaacttcccgttgcggcgagatccgacaagcattattcgccactggaatcgatgaagaaatcggactgcgcaggttgccggaaaccttcattggttgtgttggatcgttggggctcgtcagcacgcattcgcgagtcaaggtgtcgctgttggagcgaagaggaatccattctattctaacctcagagaatcaccgctgctccaagagatgcagagttagcccattgtcgctgtgacaagtctcgccttaaccacaatacgcatgaaaggaggatgtgccatcgaggatgttcttatctgtgacgaacagcttcgtcttgtcgcctgtggttggttcgaattatccccgctccattctttaccgatatgggttggattggcttccggacccgcaatttcaactccgacggtttcgctccggcattgaaaacagcagttggagtatcattgaacccgggcttctcccaaccaggacggctttgtggtacatctcgcggaccgcctaattgacgtcctgagcggctttctggacgacgaacatgaggtgctcctttcgcaactctccatgatcacattgagttttctcttcaacactcgagtcgggacatctcagctcgaggcggagtgtggtgattctcaaagatggttccgggtccgcatttagtggagcagccatctagtttgactcgcataactaatgtgctcaatacacggctccttcgaatctcttggactttgcatgcaagagatcgatagggcgttccaatggagactgagaggagcacaccgtccgagccttgccagtgtccatctcgctttgacgcctcttccacaaaacggctctctcgaagtttttcccatcgaatgtcaagattgtccgggatgatcccaacccatttaaaatcagagtgatcctctcggtgcaccggaggaatcgagcgcctctgagaagagagatgcgctccaacgaccaatccaaagagctattatctccgtcaggagaggaatggagaggaggaccagacaactaggagtaggagccactgtctggataggagacacggaataaggtggacaatccaacacggagaagcggccataagtgataacgaaactcggaatagcgcctcaaaacaaaaactttttctttattctcccgagggagcgatcccgatctcgaaacgatgggcacggcctgatcaagcctcagtaatcgagacctttggacacgatttccttacacgtaggtctaaggattatggtgtgctcatattgtgcggtgtagcatcctttaacgtcacaaagcggaggataagcttccacgatgcgtttgtcacacagatctttcaacgcggcgaggtatctgctctggccgagtctgtcgagccaccgccggcagaatgcgagcgtgccgaagttctcatcgatcactctgaggagctgtttcgacgagttcagtcgtaacggcacgtgtcccacgtcgaaatccttcatgtagtgcgacacttcaagatcattgttcacataccctcgtccagttgatccgaaagtctctatggcaaacacttctccctcttccatgcgagtgtgctcgccgcccttgacgatcgggacagtcttgccggcatggatccgatatggagcaatagagtgtccattgagattgcgaatacattttaccgggtatgttttgccgtcgatttcaacttcgtagctttccatgacctcctgtacggcttcaccgatgtcgcaaagacgaacgtcgatgccggccgttttgattccagcgtaggtcgcctccctcacagcttccaacagtcggtcgtacttgttgtcgaatgtccaggtgaaggcgcagtcaatgatccggccattgatgtgagttccgaagtcgatcttacagacatcttgcgcattgaaaacggtggggtctccggcatttggagtgtagtgagccgccacatggttcagcgagcacccagtggggaaagcgagacctgcctcgagtttgttttccttgatgagagaccgggccgtattctccagggtctcgcaaatgtgaatcatatccatgccaggtttaatgtatcgctgcatgtgctgtcgtgtctgacgatgaacttccgccgccaaacgaatttctttgtattcttgctctgacatcgcgtcaagagctttcttctcctcggaagtcatgcggttcttcgcagtctggtcgttgggcaaatctttcggcgtcggatgctcgacaatctctccgggtggatagttgccattcgggaacaagtcacttacagggattgtcggaggatcggtctggaccttcaccttcttcttcctgttgcgcttcttcttcttcttcccaacaccgtcagcctcgccgtccggtccgagagtatcgtcgtcttcgtcatcatcctcgatctttgtgtcttcaatctttctcgcgactgcgtcggtgtcgctgccattcgaaacggcagctgctacaggcgatttcttcggcttcttgccattcatttctttcttgtcaggcaagactggctcaactttcgcttcgccactcatgctgggaattccgcaagaaaaccgctgctgcagttggacgaaaacgacgacggttcaacgaggttcaggctgcggcagcgctagcaacacacaacaacgtcgtagagaaaagatggtacagcagcagcatgactatttacaactttcccgaacaacctgtcgtctgccttcaaagtcacccgccaaaatggtggagtgcgtacgatgcagatattcgctcctcgcaagcgatggaacgcagctctcagttccagagtcgacccgataaagatatccaaactcacaacctatgcttggcctaacctcaatgctcgtcgagagatccgtgagattggcatctgcggttggatagaaactgaatgatgagctgatctatgtcggtcagaaactcgcatgctcgtacttttcactcgtgtgctgagagctgagcgaatcagctgcatggcgccccccatgctgagtgaactcggagcggagctttattcatgagaacgttggcgagggctttctctacgacgcgttttctgttgacacgtccgaggagtctcgttcagctcacggtcttggcaccgaaaatgaaaacctatctgatctggttcgtccacgaacacgtcgagttccggcacgcggagctacaatctctaattgagctgttaggtgcgaaactcgaattccctgaccgcgaattggacggtaggagactatggatggttgacaccaggtcagttgaatggggattcgttctccgataatgtgtatctctgtgtgacagtacagaggcctgaaactgcgcgtgcggagaggaattcgaacgtcggaacgaatcctcgaaagatttcctccggcaacagcactcaatcgtttatgaggtagaagcgctgctcccatcctcgtccagtttccaggacgagcattccttgcgtgactgagcctttgagcgtgttccgtggagacaggaagggacgactgttttttttttcttttttatagcgaggagaacattgagctcccctggatgattgcaacctgtgataccgaacagcaccttctcgacatctgcaaacggagcattttgattcgatacgtcatagaactctacgctcagggcgagtcgattgatggcgttgtcgacgaattgaagcagcaggatttcaaagcggtaagggcggtcaagaaggtggtcctgagcgacgaatgattactctcgactagcgaggtgtctatgttgtccacaattcatggtgccgagagttttctcgaaggacttcatgtctcgaccaatttgcagcacgaggaccttttcaagtttgaagtcgaagcctttggcagaaggaagatctctcgagaagagaaggtggccaagatggaaagattcagtttccttccgttcaatggcaacgtcagtatgaagcattacaagcacctctattacatcatcgagtactatggtcaggagaacaacgtgtttcgaaaggaacctttgaaagtcttctttggacgactggtgagcagactattcgaagatcagtttcctgtatttccgttgggaactcttcttagctgagcctccccgccgaagcaggagttatgagagtgcgatcccgtgtccatttgtacttgcagctggctgaaggccgtcgggatctcgtgggttggctttcgttgaagaaacgatcgttcatcgcaaatacctctatggaccccacgttatcgattgtgatgtcgaacatggcaaaagttaagagcgcggatctcgttttcgatcctttcgtgggctcagccagtttgttggtcgctgccgctctgcatggggcttacgtgatcggtgagtcctaatgacatcgttcgaaatgaccgaatccatgatgtagaaactggatatgttgtcttgtgatctattatgtctttcgtttcacatcttgatccaatacagggatggacatcgattttcttctgctacacgggagagcaaaaccctcacgatgcaaagtgaaaaagcgcgaggctggggaatctgtgtataataacctgaagcaatacggtgtggaaaagagatacgtcgacgttatcgtcggcgactcttctttgcctgttttgagacacctgaccataaactcaattgtcacggatcccccatacggcatccgagagagcacggaacggataggaacgaggaagaacaaatacggtggactaaatcacgcgtaagtgccccggcgcggcaacagaccaagctgcattccccgcgctacctcacgcggaatcgattggctgagggatccctgaatttccaaacctgaattaggaatgtcggtccgttccaggccagaggaacactacccttcgaaggtctcgtataacctcagcgaggtagtgacagatctgatgagtttcggtgccgcaaccctacccatcggcggtcgtctcgtattctggatacccgtttttcgtgaagattttcttcgtgatttcaagaagggaacggcttgcccgaaacatccatgtttctccatggtttcatgttgtgaacaacgattgactacacattcctcccgcatgctcttcacctatgaaaaggtctgtaagattcgatgactattgtgagactcgcgcttgagagctcctgttgctgttggtctctcgtctcgtaaagcatatgttcctcagagtttgtttttcgtgactaacaaggccttttgcaggcgaaggaactcgaggaatccgactcccagaagcaatctgattcgtcgtcgttcactttgcatgatcagcaaactttcagagctaaatacttcgggaagtacgatccgacgatttcgccatagcagttttcgattcctctaccactataaaacccgtatttggaattgcttgctgctactccgtaggaatgaatctattttccgcagcagaagcgttctgttttcgtgcgtgagagagtttcagctcaagagcaaagaatccatggtggatttggccgaagatcgatgtgacagttttttgtgtggacactgaatgggaatcgggctcctggagcttcgcttctcgagctcgtagcttgcttcgtactaatcgacgcttcattttgcgatacagagctccaagaactcgattcccgaagaatccccacagaaaacgccgacctcagagcccagagatcaatatctctgtcatcatttgtcttagcgaagaccgctcatgaataggcataggttgagaggaaaactccgtgccgttggcatggagggagacatgattcatagtcgaaagttagaacatcgcagcttgcacaactcacaacggttcatactcgatgtgccgaaaccgattgcaacggaaagccgtagagccgaaaaaaaatccctcaggtccgagaacccctcctctcgttctgatggtcaagcggatccagcaaagcttctatgcacagcacagagtccgagagactgcttttggataggcaaggagagaccaagtgaatcatgataactggggagctctataaccaaaacgatgcccgactcgatcgcgagccgagcagggcaggttactggtcaatgacatggcgggtatgtgaaggaagccatttacgtcgaggaacttcctaaacttgggattttcgcgaagcgccagcgagttcgacctcacaggagatcatttgcttggataccctgactttaggattacacgggggcagtctctcagacccgttcttagaagcttagctcgattctctcgaccaccgagattttttttcgaccccacgggttcccgttgtgacgggcttttctttttcggcccgccgagttttcggtgaaataactttcggcaaatcgagaagacaccgtaatgactctgtaacttcacggtgactcccaaccagtaccgtatctagctcagcggacaatcggagcggggacgttccccgactggtgtcgaagcggatctgtaggtgtaatcgttccctcgacgagaacacatctgaatatctgaacgagccatcgccggatccttgctcccaacctctcaagaattcttcccgtgtttcggccttcgcatgcgcgtcgaatcagcctccgagtccctcatggttccgaggcgaagcagttggaaacgaaaaataacgccagctctgagcccccgcctccctgggacgagattccgatcaagagacgaattgaatttccaacgcagacggacaaaagttgcgccccgagtccggcgcccagcgatctgctctgcgccctattcgatttgcgcccggggcatgtgcccctccgcccctagatacgccattaatcgaggcaaatcttccagcttctagttcctcccttccttggtgacgaccgctgaactgctctcggtgaaacgagcctaaatccgtcactttcccctaagttgtgatctgttgaggaatctatagaggacacggcagagcctatagccgaattcgacttgctctgcgtgaacatatgagtcttgtaaatcatccgaaaccgaaggccatgtgcagcagggagaacaagacattccgccccggatatttcagccgcaggacagcccggccctgggaggcttccgctctggaaattctgtccccggcgtgcagggccggaatgtctcgagcccttcccatcaatggacgtggatttcagttggaccgctgggagagaaccagagaatataagaatccgttccgcagcctggtatcactttgccccctgtggctcatctacaagacatgcgccacattccttcgtccttgtgtatgtaacccgtaattccacatacaacagctgagaaaatatatcttcattcatagaatccacagaagcactacttccagcgatgtcttaaaaacgcgcttcgagcgtttccgaggtcaacacattgatccataagatcaggctgggttgtcaaaaaacgctcatcggatgatcctctgaaatgtttgttcctgagctcagcgattcgctgagtctacgaggaaagtgccgaacagaagatctcctgatatctcaccttagcagtcccgtggaatggacaatatgactttttgtagccgaatccaagcccaacagacaatacgaaattctgcagccgcgagtagcagtttgggtcggagggctttacggtgaagttccttcgtgatttctggagaaacagccgaaccatgagacatatcattcgctagctctcggaggccatagttctgccgattcccgaattatttcgaagcatccgctttctcagacgaacttgatgataacaccggtttcgctaacaggtacgattttcgtgaagattgttacgatgctgagccacgccaatacgtatttcacgacgcgattggattacgtatccgtacttccagtggaggccactttatgtcgccgggaactcgtgtccttgtcgatcaagtggcaacataatactcaaaggaaaattggaattcaccccggtcactcaaaattaagtcgaactagcgaaacaagtctcgaaaatgtgggtcacgatgtttatgctctttttctctggaacggaatggaaagaaaatggatgcggagtgtcattccgatatccgagcatccgatgttgggttgtgagactggtaataagtgtcatgaatgtccatcggaatcggcagctcttgtctcgtccggaggaccaaaatcgaattttcaagttctctctcgagcagaaagttgatggtaagactcattctatgacgagggcagaaacgcttctcccttcaacgtgcctcccacctgaactcggttccccagccgtgacagctgggcactgagttagcccccgatagaagaagagagtaactgcttctggttgtgtgctaggatggaggctcatggtgggctcgtatcatagacaggaccaggaatttgttgtggcatcttttccgagaagacgtggcatccccaaaatcgccacagtgctttagcccccccgattgtttcagtcaagttatggagtcggaaggggaaacatgactccccctcaatttggtcgtcatcatcgttctttttcgcctcagttccgcagccagtactttccctggggggatgctgagttatctttcgtctgcccacttcacacgcgttctgcctcaccttggagaaaccttccctttatctcttcccagaccattcattgagtatctgtaaaatctatacatgtgtggagtcattgaaaacggtcagatcgccttgtcaacaacaacagtagcttgccttcgatttggtagctcggaagctccccaataatattaggtgcgtgcaaaagttctaggcgctaaacttcgacagctcataagttcgcttccaggggtcgcagagagatgctgaaaatacgttgaatcagctttcagatgctatcgattccgttgtgattcaacaaatggcctgccaataccgacggtttcagtgaaatgtcagagaatcggagaatcgcggtttctcgattccggcgaaactaagattatgacaccctgttttctcttcggcatcatgaagttcgtcgacagtaaggctgtttaaaaaaaaagttgagcgattcggccgctgccaagcggagatatcggcctcgaaagtttcgattctcagccctctcgatcgatgtttagtgaataggagaaaaaaaatgctccctcttcacccacaaacgagccaatttgaggtgccgcatagcacatcttatagccgggctcaaagcttcgaaaacatgtcatctgatccaatttttggctctccacccatagcttcggattgcgagtcggaatcacaaacttcagttccgctgcctgagccgtcccatggctggcaccggcacaaattccctggaaactcttggaaagcctgaaattggattatatgacatgtctttgaaaccttgaacaaggctatgaagtttgctatgcagttatgctatctcaaatcggctcgttttttgggtgagatgtagcttttttcgaggaggcccatatttttcccaatctttcagcttgaatcgagaggacgaaagttcgaaaattccgaggccgatatctctgttccgctgcagccgaattgctcaatttttttttaaacagctcattcctcgacaaactttatgattccgaagagaaatccgggagtcctaatcttggttttgccggagtcgaggaatcacgatttttgaccatttcaccaaaaccgtcggtattggcaggccgtttcttgaatcagaacgaattccgcgtattttgagtgttttatcatctttccgccgcttctgggagcggagttatgagctgtcaaagtgtagcgctcgggaactttgcgatatatccacatgcgtggtgtttcgtaacttctctgcaacttgagggcggatcgaagctccctgaaagtcaacattctctcgaagcgcgtcatgagtggtggattgataaagtggttcgacgagtcgattcaaattatatggacttgagtccctggggagggggggggggtgctattacccagtcagccccaaggtggacccgcgcctgctcggcgaagcttgcaggctcggttttcttcaatggtctcccctgaatacggacctcagtcgcgaagaagaaactgtagagatgccatgtcgataacgtaacgggatgcagtcgggttcgcagaaatttgacgccgatattgcgactcagccaaaggggctcgcactatgggtccctgcacacatatcgcggcctttgtctacgatctgccccacgcgcgctagttgtccaagatgatcggaccagcggagatcttgagttcactcttcaagcatagtgcgaacgttccggttgatagagggaaaccatgatgagtatcaaagttctgttaacgtggagatagttgattcggttcacgttccgaggttcttctcccatctctgcgggtccagcaccggtacccaagtttccctcggcagctcgtccaggggacctttaaccctgggtgtgttttatggctatccatcgtttgtgttcatggtgttgtattcgtccctgtctccaggtccctctcgtttcctttgattttcgaaatggcagatatcatgtcttccactgcttcccaatcaggatcgaagctacgtggatcgtgtgaaagcgcgtcggagatctatcatcacagaggttcaatgcgatggcaggtcaacttggtgttggcaacttgagaatgattcccaacatgttgattctcggaagaaatagccggaggaacacctgcgtaccaaaacgagatgagcctgcatgaggtggaatggcttcgtggcttgaagagaatcctcgaaaaatgatacggttctgttttttcgaccgtttggatcatttcggagtcgatcttgcattgagaggaacaaaatcaatctttccgcatcgtcgagaatcgcatacgggtagccttcctaatcggctagctttcgaacaggaaaatactagtctccgatctcttgttcggggggttctccgaagctgaagtcgaatgagttattccatcggtcatccttctattttgacgtgcatctcgagagtaaccggcgatctaggtaaactgagatgggtgagaatgttgggtgttgggggagggaactgaccacaaggttagatcttagaattgcgattgggcccgcatcggtcttacattcacctagacccgtagttctcattcaggagccatgtgccccgaaaggggcaaggcggagtcttggggggccatcggcgattttcttcggccgcgttatagtacatacatattcacgtccgaagagtttggactccacgtggcaagcggcgcaaatcagatcttttctgtccgtagtctccgagcgctgcgcgtagctatcaacgctgaacccatcgctgggcttacagtttcgagctagcgtggaagactcctgagtttttggtatgcggatttctcaaaatcgagatcaatcgtgcgttatgtattgccatcatgtaactccagaagttcaacccgactccaacatcatattgttcgtctcctcagccagaacttttgatgggattaggggggccacgactcctttcctctagcgttagggcggccgcgggcccgaaaaggttttgaaccactgggttagatccccaggtcccgagcttctcccgcgaggttatcacaacaagagcataaacggtcgcctgggagtttcaagatgaacgagtcttcaacgtgattttttcttgcctcgaacatcatccgccatccatcccatgccagattttctagctccgcaccaacgcgttctggatcatgagttgctgtacctacaacgcattgttgtcagctttaacatacacagcccgtcgcgtggaaatatgagtgacaccctacgacacgagaattctgagtcgcgttggagctactcaaaggggaacgcgtggagatattccgtgaagctcgttgccccaaacaagtcgaggcataatcgaagaaccaactgtttgagcgatccacgccaacatcatccttggagaagaacctatgttcgggcatgtggcaaggaactctttccccatgaatccgctgaaaagctgtctaacaaccatttctccgcgtaggagctccacaactcgttattgccgtcgcagcggcattcctgctctcggagtttcagagaccgtcgaaaccatagcatctgtctttcgtatagcttttatgagtaaatgaagaccttcgattccatctcgcctttgaccctctcgcaacaagagtctgctccaattgaacaagaaacgggatttctctgtcactggtgtttagctgtggcgcttgtattcgtgaagcctaagacggaaagttcccaaatnnnnnnnnnnnnnnnnnnnnnnnnnnnnnnnnnnnnnnnnnnnnnnnnnnnnnnngctcaacgggccacagcagcagcgccctctcgatctccttcaaccagcggagtgtgaccacttgagtatagcagttgaccgctgttgtgcttgcaatttcgagtctttctgtccgaggacactaacgaagtgtactatgtcgatcaagaagatttacgcccgtcaaatctacgactcacggggcaatcctactgtagaggttgatttgaccacggcgaaaggagtgtttcgtgctgctgtgccgtccggagcgtcaacgggtatctacgaagcccttgaacttcgcgatggggacaaaaaggttcaccacgggaaaggcgttctgaaagcaatcaagaatgtcaacgacttgattgccccggcgctccttaaggagaacttcgatgtcaaggatcagcagaagatcgatgacttcatgatcaagttggacggcaccgacaacaaggacaaactcggcgcgaacgctatcctaggtgtgtcgatggctgtctgcaaagctggtgccgccgagaaaggagttcctctttacaggcacattgccgatctcgccgggaattccaagatcattctccccgttcctgccttcaatgtcatcaacggaggatgtcacgcaggtaacaagctcgccatgcaggagttcatgatcctgccgaccggggctgcgagcttctctgaggccatgcgtatgggaagtgaagtctaccatcacttgaaagctgtcatcaagaagaaatttgggctcgccgccaccgctgtcggtgacgaaggcggtttcgctcctgatatccaggacaaccgcgaagctttggaactcatcaaggaggccatcgaagccgctggatacaccggcaagatcgaaatcggcatggacgttgccgcgtctgagttctgccagaacaagaaatacaacctgtctttcaaagaacccacaccagtgcccgagtcccagcatctgacctcggcccagctccagggattctacgaggacaacatcaaaagcttccccatcgtgtccattgaggatcctttcgaccaggacgactgggagggatggacatcgctcacagcggcgactccgatccagatcgttggcgacgatctaactgtcactaaccccaagcggatccagatggcctgcgacaagaaggcttgcaactgcctcctgctcaaggtcaaccagatcggatccatcacggaatccatcaacgctcatcttctggcgaagaagaacggctggggcaccatggtctctcaccgctcgggcgaaactgaggactgcaccatcgctgacatcgtggtcggtctcagcaccggacaaatcaaaaccggagctccctgcagatctgaacgtctttcaaaatacaaccagatcctccgaatcgaggaagagctcggctcggcggcggtctacgccggcaagaacttccggaggcccgagtaagatgcagaggacgagaatttccgcgacttctgacccaattcggaggaggcactgcatatgcaagccgctcgacttcgcgtcgtctcgtttcatcagcttatcaagctatcgaggttgaggagagaaacaattcatgtttgaccttagtttttatgtcgcacataatgtggaacttgaagtagactataggtccgcgtgccacgtaagcgagtcagaggttctatctggtgcgctgactatgaaaacgttgaagagattcttccggtccatttcgaagcagtgacggtaatcaataaacgtagactatgaacagcggcgttggtgtgctctttcgttctactggacgtttcacacggtcccgtgtgatccagactcaccctggtatcatgcgatcatgagaatattccccaaatcagggaaacaggttcaagaccgaattgtttccggcaaggcccagcttgaaggtcaaccgtgtccgcctgataatgactgcaatgggttattcggttcgagatagatagggaggagctttgcgggctggaattgtaagtgaacattgagttcaataaattcatgtcagttggatgatggctgtatgacacgtcggattctcaagaacgccatgcaggaagctgaaactatgctatcatcgatccccatcaagcggagagggcaaactgtcaggactggtcagcagtttgagcacaatggtaagacttcggagtttgcagttaaaacctggcagagctctgggatccagaatacaccacaaacggaatctttgactctcaaagctgcacggaagaagctctcgcccagtgtgatcgctcttctaacataaactaacctgtcaatgccagcttgcatatctggaccgctccaagcggagcgtgcctctcatcaggtgtttggttccgcatctatcggaatctgaatctttggtagcgaatttcatctgcggcaccaccctcttttcttcccctccgtgcattaaaagctctgtgatcttcttctcacacacaaatcggatccggacttcgctccgagcagatagccaaacatatataatgccacagccggagcgttcctcccgagaacgtctcaaacctgtggttcaatgcaacctcgggttgggacccgcgatccagtagaccccgggaatcgtgatctcatacaacagagtcacagcttgcagccagtctcatgccttccgacaattgctgcaaacccaactttcgaaagatcttgcaacaaacttaacgggcctgccgtgatagtagaagaaccatctcattggaatccgacaccactgctcgtttattcagtaggtgaattcactttatgaatcataacagggactgctcgtcaaacggcagaacaagtatccatttacgctttgggatgctcaaagattgattaaactgttcctaaggattggcaatctgatgccagaaggtagatatggggcttccctacccgaccatacctgatgcgggaccacgtcgagattgttgaaccccgacgacaatcacgctatcgaataattatgtttcctcccagagttttttctgtctttctgcgttgaacaatactagaaactcagttctcaggacctacaggatttccctgactcttcactgtacaaccctttctgacagaaacgtgctcccgatcaagtggggaaaatggaactttatattgcgctcatgaagttttacccggccataggtttctgtgttcatgtggatttgtgtaacctgtgaatccttcctcgtctgatccagtgctgctgcttctatcacaatgccgcaaaactttgctcacaatctccctctcctcacattcccggaacaatatccaagagcttttgcttccgccaagacccatcatttcccaatccttcattatgaaccatacattcccatcacggtagtcactgccttcgcgggcttttcagaactcccctcgaggatttctcgcacagggtctctctcgattccgagcgagaagtattcgacggaatcggtatgacgatcgaactgaataacgttgagtcaccatgacgcccgtgagaggagccaaacttcgactgaagttcctcatagcttgatggatgtgtttgtgataacgcgttctatttgacacaggggaggggttacaactggttgatcggagtacggaagggcggcaaccttactttggtcaacccctttcctctttcacagaattttcgcttcagccgcgttctcaagacgaaagcggtccagggatgagcgaacgcatgtttttcgacacgacgccacttcagaatcacatcaagaacaaggatcattttcaaaagtaaaagttgtgcggcagcgacactccctaaccaataatatcatcttctcccagtctgtgaaaatccctcccggttcgcttctcgcaaatcttcgctcgaaatctcgaccgtcaccgataatttcgaagactcgatccgagttatacgtctgtctccatgagctcaagctggaggtcgtccatgttcggcatcacgagaaccctctggaattcctgcagggcaaagagacgaatttcaacgtttgagatcgttcccaagtcggctagtaacagcgcgaagttcgggaatcgtccgaagacgcttcgatcacggaaagaaaatcctcactcgcctggaacaatgccctctcaatgacagcggccaacatctgcttgaatgaaatctctttgactcccatctgaggcgtggctttgaactctaatcggggcacgctccggaatccatacctgcaaacagtgattttttatgcaaacggcgcgaccggactcgggattattcccgaggaggaggttcgagagatcgggaggaacaaaagtcgaccatgcttaaggacactcaccaaagacgatcagtgggcggaggcggtatgttcagagcgagacgtccgacgagcgaagttaactggatagttagtttaagatcagtattcgaaagctccttcatcttcttcttcacatacgcagtttctgtcgcctgctggaacaaactccactgtgagatgcgatcgaccatgtctaaaatcctcttcgaggttgcaccctgcgcttcctccagctcggcgtcatctgtggaagagattcgagaaatccgttgagatcgtgctgactagaaatcaccgaggaaagcagagacttagtttcccgaaaccagttcgggagtgagggtggaagagggaggctcacttggttggtttccgttgctgtcgtcgtcatcgtcatcctcagacggcggctcatcgtcatggctcaggtccatcgacaacgtcatttcttgcatttcttgttcagctccagcagcgatcggcttgtctggcagtccttgtttcttcagtttcatgagattgagtttggtattgactgtcacttggaagctcccgttgtacgcgagctccacgtcaagccatacgcccgtgttggggcagtgcactgcggcagacgtcctccggatgaggggtatacgctctcctgccatgagaccaaacgtgttggataaagtgttgaagttatcggaatggttcgatccaagaacctttcagagaagtaggaggtctcacctaggtcgatgtcggttatggtgagttcctccatgaagaagggcactttaattttcgacagtttcttctggaacttcgctctaacagcctcggcccaacgaggctgggtgaagaaatcgtagagaattctaccgacgacaagattcacccattgggtatctccgtcacggtactcaagtgcctacgagagagagtttgatgattattgggatcggaaatcagttgagaatggcctgcggcgccctttcctcgaacttcttgatagaagagtttctcaccatggatggacaagacggctgaattgcgaatgttttcttctcatcaggcgttttactttcatgagcaattctttgggtgagagccaggttgttcatatacacgaggaaattgacgggtggacggactgtcgggatttcgtcttcatctttgcttttcacctgcttcttcacgacaagaacaatcagtgagttcgggaagacctctgcaggttcgggagaatccccggctatcattgagagacgaaccttttcactgaccagctcctcctctttctctgcgtccggagtgcgattaccctgactcttcaggtgagcctcgctagcgtttttcaaaagccggaaccagtgttctttatcacggcatgttctggcgaacaaaaatacctccatagcttcttcgatgccttgcgctggaacgctgattgtgatggggtacttcttattccagaggcgtgacgccgacaagcctgcaaccgggagcagagcccgttttaactctatgtacgtcctcatccagttgtttcgggtatccgaggattcatttcgagagcggggaacgaacgcataccttcagggagcaaccgcaccgtagctccctctagtttgaggaaccattgctttcccagccacacgaccgaattgatgtctttgtgcttttcgttccacatcgcgcgtctcgggagtttttccttcggggttcgaatgcggagagtcgtacccgacagacggacgtggacggactggcagtggctgccaagatgagttctaacgtcgtagggctctcccgcgggcagtgcgttcatccaaccctcgaggaacccgatttcttggtgtcggggcattaacagcatgctattgggcgcatcactagcatccggaatcctcctgctgggcggatccggaggccagagaagcccgcagaccacattgtatgtccaccacgataatgaggctacaatgaagccttgcatgaacgagggcagaggcacgcagaccaggcacgtcaaaacagcacagagcactccgagagttctcaaagatagagtacggatctcttcgacgatgtctgggaaagctcctgctatgtaagctgagtccagcgcaagccaacgctccttgacacgagtgaagtcccgatagaaaatattctcctgcgattcatcaccggcgggaaaatcgatctgaaaattgacaatgttgagtgggatgttggaactctcaagcgagctgtccgagagaaccggtgtcaggactgatcaaaacggagcattatgacaagtaatgaatccatatttgaggattccccctcttagacactgatgcatcacagcacacctccgcaaaccgcttgccgcacctcaagaccagtcgctctcgaaagagaacatcaatcagcgctccactcatagagactcgtccttagcgcatgcaattatgaaatcgctccaaaaggaaactttcctccaacggagctcgattaaggtttgcgaatggatctcgtttagacgtcagcaatggaagggggcccacgcaggtcccagggttcacgaaaggaatgctgacgagacgtcgttcagacggagtcttcacggaactaggatggcgacgagtcgagagatatttgtaggactgagctccacggagactcttcgtaatcagcgcaattgaagagttgagagccatccagacgattgttagtgccagtggtatcgttaaagccgggccgatccgctggcggaacggcggaagccaattggttcaagtggctcaatcggagatcggagatcacaaaaaatgttgaaaagcatcaccagagacgggtgggtcaagcttctgatttcttggcgaaacgacgaccgataaccatgggagagttcacggcggggtgtgagccccaagaacaaccgacgctgactgagaagtcgagaaagctgtcctcattcgcggttctgagaaggaggccgaattcgaagtgcagtacgatattcttcttcgaacaatagatggaagcatgtcagggagcatcttcccctcgaacccagagtagaatatttctcccctcaccattttagaacctcaagccactgaaaaggaattattcgaaagttccatcgactgagatttaccttttcccaagaatcgtcctccagaatgagctcgtgaaccattttcgagccgggcgacttatcattgctctccgcagtttcctgtgacaagaacagcaggctcaaatgaactctgccgatcggtatcttgtttcgaaagcttcaacgaaattagcggaaaagtggcacggatctccatcctgcagatggggacaaccgatgacatcgagtgtttctcgacggtttacctgatcgaacgccatagtttcaggtgaagcttcctccgctctttcaacgacgtcgtcttcatcccggtcctcttctgctcgttgttcgaagggtcctttcggcaccacgggcatcgactgtgagcgcgatctcttctcttcgatttttttcacaattttgcctttgatacctgtgaagcgatatttgcgtttgagctcaacaagcgctgttttcatgatgtagactcacgctgccagggtagtgaaccactcgcgagcgcaatcgtgatgttattgcccatgtcgaggcgccagcttttcactttcgagctctccgtgtcgataaaatccgtaacgacagtccggccgcacacttcgagcgcgcgtttcacaagttttgacttcgggaccgatgacattccgagattaccagtctggagttcgggactctccttgagagtcccaacgagtacctatgaatatggttgagccgttgtgatcggaagaaccagtgccgaaactatgacggaacggggatcctcagtggtgatgccccgactcagctgagtggcgcaagattcagaatgtccctccgccgtgctgttgtacatgcgaacaatgcattgtacgggcggacggagcgaatcatatctcagtaatatttgtgctcagggtaatatttatctagtgccgctagcggggaatggatcatagaacttgtggcgaaggactagacagcacatctcgtaaatttcgagctggcggcattttctcacatggaaggttcccagggattgcacgctgagctctcccagtggaattcgttgattcggctcgtgtcttcagagcgcggaaagactgatacaatgggggagccgtgacgaaaacacactgatcgactccaccaaatcccggggagttattgctgacgtgtgtacgaaatagcttaataagccactcaaacaagataagaagaacacaccagccgtggctcctggtccaagcaaacatatttcaatgatgaccgattaggcttaggatgatatggcatttgtgagagcgagtttgcgttcccgctgagttggctcgtggtttcttgcgcgtatacactcacccccgaaccagctgccgtcgcggttctcctggggagcattttccttgtccttctcccgattttcgcggtcgaaaccaggcgatggactgcgagacctgtcctttgcttctttagacggctctttgagagttttctcctccttcttgtctttgacatctttttgttgcacctctttgatgttggcggtagcatccttgtttttctgctcctttccagtctgttttctgaatctgaggagcaaatcaatgaagcctgaatgagatggacatgaaagtcatcagagtcaaacagtccagccgtcaggatagtcgccactcatgcaaaaagtgcagcaggagtcaggtccttcctctacaacggtggttctgagcagccacaagggtcgttttcccatttatcgaatgtgatggaacgctcggcgtcgtcccagaccacgggaatgaatacaggtgctatgaacaaaatggaacacagggcgggaggggctgaagagcaacacacacagtatcatcaactctttgaggttagactacttcttccctcttgactcttatggttggtatgaaatcgtcgatagcgtatttcgatttccgcgtcgttgtttttaccattgataatatcagataagcgagagagaatcgaatcagaatcaagaatatagaatcttgagtgtgagagaagaggatcggcacgccataatcccgcggctacatggggactttaatttctcgcaacggagaggaccctgaatctagcaaggatcggtcgcttctgagaaattcggctctgcttcgccgcggttcccccctcctaacctattaccgatgagtgatctatccgtcccgtacagcggatcttctccgtgcaaaacattaccaaccttgaaacaaggtctttgacaggattcgcctggtgttgtggcgtggactgcgggggctgactcggacattcttggagatttttcaatccgacactcgaatcctcgtcctcgactatctgaaagcgagaaacggagcacatctgcatcagagatgttccggacacgaaaactcctcactttcgccttcggtgcgacaatcacggcaggctgttctgaagagggaccggacagaccagaccttcgggatagagctcacctggcccgagacatcatgcggaacggatctcagtgatgtggattcgggtgcatttagagaaatcggcgatggcggattaaatattccttcaagatcctctttttcagggtcgtagcgaaatgccgtctcaagcaagagactacgagatgcgttttcggctccgctactagtgttctttcctgcaaagaaggcaagcatttccctcatatgttggaaatacttcgactcttcgattcttgacgatgaacggggataggggtgatgtgacgacgcagcaagcttgcaaacaatttccaacttccagcgagctctgaagaaggaagtcaagttgttggcttcaaggttcaatcagcataggtgatcaagattttgtaaatgagaagagctctggaacctcgttcatgaagtcactccgttctgcaatgaacacgcgtaccacctaatcttctctgttttgactaactttgtgtgtatcgtgcgagcgagagtgagtcgcgaaagacgatagacgatagattcgttcagccggcgacactatcgataatgatgattccaaaaattcgatggataacgaacatcacagctagagaccatgttgtgtcgttgggctctcgccttccgcaaaatctatggacgtttcatttgagcccacactcaggaccgacaagatcggaacgctacagtctcgtgtctgaatcgtcacatgcaaattcccattcgcgaagcagttcccagccgatatccaacagtttcgaccaccagcgcgaaaggaaccgagcatcagaagtcaagtgaccgtttccaaaatcatatgaaggcgaagtccgcagaaggttaccacgcggcagccatgagcggggcccgtgacgtaaaacgcatcggtattgcccctcccacagaaacagtttcttcgtttgagttgaagcttctccatatctccgcgaaaccccaactccattcgctttatcccagtctcagactcgcactttgcgttccaatctggatccaccacacccacaggaagaggcgcatcgtttcccccttctgtttgtttgactgaatgttcagttgcaaagctcatcgtccatcgggagatcacggtcgtgcggctgagacccgctctaaaccaaaccaacattcccattatcattcgcgttgagtcgaggtacaagacgtcgacgttcacgaatacttccagttgagggaaagatattacgacacattgccaaacactatgactcagtcggcttgagctgctgcacgcaagcgtcattgacacaggcttttcggaaacttcgaactgtcgaaggtctcactaggaatccaccgctggcgacgcaactccccgatcgatcgaatttcgttggcagtggacgaaacagtggaaagaaggattttttcttccttgtcacaaatctttccagaggaatttcccagcaacgccgagtgatgaagcactgggaataagtgatcttctggaatacctctcgtggtggatgagtatgtcacctgtctgtgtggtatgcctcttttaaattcgaagcaagctgttcaaatcgacgtcgagtctgcgtcctctatatcagcgtctagcgctcaaaaccatcatcagctgttagttgcctcctcaggtgctcacatcttatcgtgattttctcagaatcggtttcgatgcgagctctgcgtgcgagtcattccctcatcggatgtgcataagcaacgcagtcgttggaaaacaggaaatttctcatgatcttttcccgctggaccttcgacgaccggagccttatggagcccgcttgatggcgagaaactttgctagagaagccccgtcaatctccatgcggaattgaataacagggtacttctagaaagtgttgaaatattttcccagaaccataaattattaacacgattcgggagataacccgatcgagacacgtaaatataatgattgaaaatcattgtgacaacctcctgtcttgaataacctgttactacatcattattttatcctgaatgtcggaaatgacaatggtcgagaatggaagtttcggacgaccccttggctaagccagctggctcctcagcttttcacatggaatggaggcccggatattcttcactagaagaagggcgacccgaagctgcctctccgaacgtacctttaaacatgactcgtgccctagatgcaaagctttcacatcacaacgcataaattctatgtgcaccggtggcgcaacgctctatctacgcggtggtggcgagctaccagccgaacatcgctccttcgagatctgccatttgttgtggctcggcggctgttccacacatcagcggattgatacaacgtgggtgggcggacctaaaaaacacctgttttgaggaaacacgtgttttcgaggtgaaaattctcgggcattccactcgccaacaatgagttcaagggacgtcagcctgattgtcgaccgattccgttgacatcgattgcgttaccgagggacaagagtgacctcccgagatctagttgtagtcgcaggaagagagaggggcacgtcaccaccgagctggagtcattatttcgaaatctacgttgacatgcggtcccctttttcgaaactattaccaccgtcgcgcgatgtaaacaataacatcggcaagttcgaatcagctgttcggcccgcaggtgaccccgagccggggcggcaatcagacaaagcacagtcagctgaacacggaaccatcatgattccggcactaaggatgcttctacgcttggagcaacggcgtgtcggtcagtgtaagctagttcacgaaacttggagagaaccgtcaattattccagtctctcatgctggagactttttcagatcgaaggctgagccaagccaggcatcaacactatgatttcggtcatcgggaacgggaagcgagtaacgttaaaatattgtggtttggctcactcgcagtctctatgtcagtagttttatatttgtctcagaatcaggcattgtacgaaaaactcgtcgaaccattaaaaccacaaattgagcagagccccgaagactcgataagcatggaataaggtggcgtgagcctcgtttggactgatgagatgagaaatctgagaagcctgggaataaagttcactcattgaagacagcgaacagtgctcaggtcgtctttattcatttcatgatgccgtgagaatcgtaacctggttctggctcacgccagattgaggatcagtctcacggtaggaacatatatcttgtattccccggcatttttctccgtgttcccctccatcgagtacccggtagccaagttgtttccacctatcatcaactcctcggtatgctctcgtgatccgcttgttgcatggatcctacgctggttggtatcgatatttccatgcgatgagggtgtcatggtgtctgggtttgtctggacgttcaaccgagacggagggccgggaggaactttcggtcggatgagaggcaccttcccaaatagcactcattcggcgaggatatcgtttcattcagtcacagctccggcaagcggagccggaaagctggcgaggatgaagcccggctgtaagaatcaatattcttcagcataagagaaattccgggcttcgtatatcctattaatttcatacggaaatggaccgtcgttgttggaaatcgttgcgtgtgcagcactcggcgtcgcagccagtgctgaactgcaaggatcacgattcgttcctcggagcgtcgtctcgaagccgctgaagtcgagtctgccgtatctggtccgaaatatctgctctcatgaccgttgttgtcgtggtcgacctcgtagtccaactcgtcatctcgcgtaccctgttatgctgtgccctctcccttgttgtcggtcgctctgcccgccaggcagcaagcaagcaagcaactgatgaaagagtggtttcggaatccagcgcgcctctgacgggacgcgatcaaggaagtggtgattatgatgccgtaataattagaatcgagtcctaggatggccctccagttgccccagaaggtgacgccgacgcaggccctggccatcggctcacgcgtggtgcagtcgctgtgtcgcctacttgtgttcctgtgttcttaccgtctactatcagccgatccgacgatcgtggctctcgacgcgctgaacgtgatgcggttgctcatgttcgtcattaccgtgacactcgcgttctggtcgtaccagaacgtcaaagaaattctactgtattcaatgtttttggtggcgctcagccctgtggtacgcagccttgccgagacagtttccaccgacaccatttatgcattgtcggccacactgtccatagtgcatttgtttctatctgactacacgctttcgacaccgctgtctgaagtgtctttatcgttgaactcgcagatcttctcgtcagtctgcttggcgtcgagactcacgtcgaattccgccgtgttcgccttgatgtgtgcctcagccgtcctgtttgtgacccttgcccgagtttcgaacgagtctcgccggaaacatctgttcacagctctgcacgtcatcgcgtcctcagtgtttttcttcgtggtcgagagacgtaatcgagacgtcactgctgaactttatctctgggttctgctgttgttcacagtgggaatcgctctacctctgctctacgttaggctgcaaaccctgagaaagatctgctcgggaccttgggacgaagctgtgcctggtcgctcggaacccgtatacgcacgaaaacaacgtcaagccaaaaacgactgaacatatcaccgcagctcctattttttacgatttatactcgagagccctgtaaataaagttctacaagtttacactgaaaccgaatcacacccacgccttcactctgccgggtgatcctggagagtcgacccggccgagccaaaattcggtcgtgacttcgcgacatcgtgctcacccgctgtgctcccatgcgcggggagttccgccttcgagataggatctctcgtcccgtagaagttcatgtcaaccctcagtcttccgagagcagaatgctgtactcggccttaacactggcaaaaccacttcctccccctcctcctagatttgagcgcctcgcttgaacgccgtggtagaatatcgttgtcgatctgattcgcacctcagcgcgaaatgaagccttgagttctttttgtgatgcaattcggagacgaacgaacaaggagaatattctggacgattaccaccgcatcgacgatccgacgatcgaatcgtctatgtacaggtccggctggaaatccattgtcagcttctcgcaagagaccatgcttcatcatgcgttcgagacgggtggatcgaaatttctctatctgacagggcctgagaaatgagttccgatttcgtctcgatcggagtagttcagtcctcatacatccaatgtttcgtcgagcagctccaaagctgtgcttcctcataacggcctgacagcccgtctgtaccatcagagaacattttgaggatcaattgcgcaaatgattcgacagatctagcggaagccagctatagctgaaaacaaagatgagtcattggagcataccgctggaacatgttcacggattcccatgcaagagaaagttctcgattcctgctcaccgctctgacgtgccgggatcgacatgcatgagcaacctctgagctctcgctgagttcgagctcctcgcgtgaccccactagttcgggccacacgctttcctggcggcgaggatcttgtgttccagtcgtcactggtttcatgaacacgaccagcagtctcagattttcctcagcatgaatcgatgtcacgttagtcaatctcattcactcgattctctcactagaaacggcacgcctccatgcagaatcaattggactcccgcaaacgccgtagcaagttcatgaattccgcaacaacggggtgttcagcgattgctcgctctcaacgaatctatcttcagatcgagcatgggagttctgcgcatcgggagaaagtttccatgacttgaattacatatcgccccgcaagtcttgatccttccccagcattgcgactcacggatggactcccggagtacgagtaattcatgatgacacgatttttttttccattcatccatcctgcctttttatttacaaactgtatttacaggccatcgacttctgttttgattgtgttcaccaagatgcttgcgtgttaatgttaaatcggtctctctctctctcgtttgaatcttcttagcttcttccgtatttcatatccgcattcactccctatactttcctttaagtctgcattgctccgaggacacatcaaacactcagtgaaccacctcgattctctcagtacgcttacctaagtcgacagggtgagagccatcagactcagaagacggataagtttgttttctgtaggtcaaccaagagctgagctttctcaaagttcttagccgatcacctgatgaagttttttccaagtttctcacaagtactcttccatcgatgatatcaagtgatgtatccagcgacgaagcaatcaattggtcaacggtctctcgattcatgagtcaataattcgtcccaaactttcattcgggatatcgtaaacgttgtattccactcgatacgactcggtcaatgatatcgctctcaacatgatcgttaaatttcgtgttttctcgttctttcacggctgctgccagaccacaagccaccgggcgttaggaagaatggggctctccgagccgctggcgggaacattgcagacccgcagcaatgaaagcctccgcgtgcccgtcccctcaacgtacgcctcaagggaaggacttcaccaagccgaggtgatccgttgcttctctacccagcgccaactactcccccgacgtcgcctcccgacgtttcagagagtctatgcccagttaacaaattgaggaaacttcacaaaatactcgtcagatgttccctccgtgccccggtgtcttctgtcaagtcttcgatgcccatatctgatgaagattcgcagtcgctcgctcgcggcttccgcaacgccgctcgcctgctcgttgtttccacaatgttcccgaggaacgaaacaaaaaaaagaaaagcctgccgcttacaaacaagcgtctttaaaaatgatgatatgcctatctacctaaatgatactttgtcgtcctatggtctgagtgtttctactagccgttgattgttctacaaaatggtatatacggtatatgtatatatatatcttatgtatatttgggtactctgtgaattgttgttgatggggatgttgtttgcagttttcgctgttgatgtagaagaggattctaccactgccaatgttgtcgtatcaaatgttgttgacgccattctcgtcatcgtcgtattcgtactccttgcaagcaatcagctagctgtagctggaccaccaggagaggtttcgtccgttggcccgacaaagctacatgtgtacgctagagtaatgattgtaaatcaaatcatgtgcgctgtttaggcagcccagcgcctctttcgactcggattactcgggttcttggttcactggaaagacgcgagatagtcatcgaaaagatcggtgatgccttcggcgtcgcccagagtgaaattgaagtcctcctctgtcaaggctggctgcagattgacgaatggcgtcaggaatcgagagaccatctcgtccgttggagaactgtggcacaagaaagagaaaaacatacagcacgttagcaatgcacaagttcagacggcgacacgcatgcaagacgctacagttcccattctctcttccattcaggagtcgactgattgacggaggaagctccaggaagcccagagcgggctcccatcccaacgaacggttgagattcaagcgtgcgtttattcggtatcttctcctactccgaacaaccgaccacagtacagcgaatagactcccattgctgagcccaaaaaggttaacatctcaactagggcgcggagtcagttggcatttatacggagtcgctccaaaaaactataaacaacaatcatccttatgtacaactcgttcaggcacagatgggctgctgattctcaggtcagggtccgtcagtgagatccagattctgaggaatccggcagagaactagaacgcgagtcgctccgattcggggaactctcgcattcgtagctagattaaagtatcccaagtgcaagcggggccattcgaaagattatgatataaggctcctgacaacccctagagcgagccacaccgcaacatttcactcgtccatggaagtctctaactctcattagctgtgagcgttgcatgcgcgtgccgatatcttaactacttgactttcttcatcactttcttcgaaactcacatttgaccgggtgcagtgtctctgaacgctagaggatcgtggtcgtcgtcgaggaacgtgggcgccggaacttcagctgtgagagaactcgtcactgaatgaactactcgaagagtgttgacaagagaagtcaacgggtcactcgatcccctcccaacactctcgggatgggtgcgcctgtggaacttacgttcaggtaacatctcttcaggcaccgtggattcttgggcgtcctcgggaacgaacacttcgatgggacctcgctcgctgtgtaagaatacttggattttgtcagccacgtccggaacttcgagtttcgtgtccgggggagccttgatggcgatcacgttctggtccaataacgatggaatactatgcatatctgagtatgtaacgtagccccattgtttccctggaaagcatgaatgtgcataagttctccagttgagacagtgaattttcggtggtgagagcttcaccggggccgaggaacactagcaaggccataccttcactctcggttagcttttcgagctcgccggtggctttctgtatgagtgaatctagcagagactccttgcggtccaggtcctgtaatccgacgagcaacggatgatgagaaagatcttgaagagagcaatcgagtacaggggactcctgtggttcgagggagcgcacgatacggatcagcttaccttgatctcgagatccaactgaacacttctcgacgagccttcatccatcgctttccaacggatgacgttcttctgcttcttctcaatgagacctatgccttccagcacgttggtaatgtcgtagatacgcctcttctgtaccgttaaagcttcgcaagcgtggtttaggtcgaccaactgcaattcaagcccgcgtttcgatcagaagaaactccaacccctccatcaaagtcaccatcgtctcacggagtcgctttgagcgccgctgagagatcaactcaccccgtcctgagccgagcgtatcaggtcgatgaacttcctcgtgagtttccctagagaggtgtcgttgcgaccttccttcggactcaacgcaggaatcattacgccactctggaaagagacccccatgaaagaacgccgaacccccgagcctcgctcgcgagtcagatcccgaagcggcatcgcatcgctcaagcagaccacgtattccatgacatgtttacatgagctaccttggaaaaacggatcagctgtaactgaatgataacaggagaagcttcaaccgaactcacctctggggactcatttttgggagcaatgagtttcattcgtttcgtttgtacaacaggcgatggcgttttaaacacggaggtactgtgctccatgtccagacgccgtttcacctgaaagttttcagattcttcgaataagctcgtctccaccaagcgtgccagctacgacgcaggcattttccaccgtgccacgaattgcaattccttgaacagagctcccaaacagcctggttcgtgtcatcttcgagaaaataagggagcatccctcggttctagcgttcaggccgtgaacgacggcggccggacggatggatcgacggacggacagatggaccgagccagttgggaaccggtctgagcgagaataattttcactgcattttccgacaggttttaccaatcagcaagagagaacgttgcatcactgtttgaaacaccagccgaggattgtcaccatgaccggatctgttctcggaagggggtcggtacagctatggtttcagcgtacatgtcaataccttgatggtcactcaaaacgtatgtccatgtgaccacaacacccagagcagtttcctagagctcgcgacagcagccaaacagttggattgtgctgctgttcgtaacgatggagcgaaatggttggaagcagtcggcttgctcccgaccaagaccaagctgaccgtcatttggcatcgagcgaaccgagacgaaattctctcacgaacctggttgcgttgttgaggcttaggtagtggaggtcggttggagtccgcgaagggtcctcccggagcctcaactttgggtgtcggcgtactgtactcatcatagttcatgaacaacgttgctctagtctgctccgagaaattcatcatcggacgaagaagagagtttttttcacgatcgcgtctccggttgggttcgaggtggcgctaggccgaaactagcaggactcagctatcgatggacatccacttcaacacatttggacaacgatttgacgcccgatggcttggatgaaattccaacccgcgaccgatacaacaactgaccagctagcagacaagttcctgctaaagcagtgacgagttgctcaaaggcgggaaagtcaaaaggagctcgccgattggccggcacgcgagttttcgtctgctaagggagttccctttcttagtggcgggcaaccgctctatcgatgtgagagaagagctaggtctaccgactgctgctgctgctggctgcctgcctgcctgtctgactgccggcctgactgctgcctactagcgctccgagctggccagccaacaaacggctcagcgatcaaacgaaccaaagagcaccagccgctttaacttgggggacccccgtactcgtcgtcgtcgtcgctgtcgtcgtcgccgcactcctcaccaccgccatcggcatgagcagcaactgctgtatggatggacgccccagagaatgcagcgtttcgccctcaacaatacccgacgaactatgtcgttgtagagcgacgaaccagacgagctcggtgcgcgactaaaaaaccattcctacccagccttgatcagcggttaacttggccaactcactaatgccggggccgccgctgccgcaggcctgtcagtggaatgaattcgcgacaggtcgagtttgtcgttgtgagcaacaaccgtggatggactgaggagtattatcctctctcataacgagggattcgctcatcatgaccgttgtgctccagaatgccgaccagagtttccatcaaaatccacgagacgtccgcggattctacggatccattcacgctaacccgcatgctcgctgactccgagctcgcctaaactccacggcacccaagcttttggggtaggggcggggatagggtgggggtgggcttcctcccagtggagagtaattccgtggatggctctctcgtcttgcagtggatgacgttacaggtcctcaaggtcgctgggtgaccattcccatcatggaacgctgcagtcctttagtcggactccccgttgtcgaagtcctggtcgtcgtcgttaaagagacgattcccagaagagggctgaaaccgactgaacaacggatcttgagagaattttggccgatgcccgagccggagcttgacggacctgggcgttgctgaatccgaactgccccaagctcacaacggttctccagcggggaccagaaagatcaaccagttaatgcttggaagggttgagtggctagcgcctcttcgctttacctacttcgcgacttcatgaagaatgcagctgtcacagaaatgctcgtcgctggtcctctgcacgacggacgtaatgcacggcgcgttggatggcttccgccggcttcatggcgattctcccgcgtgtaggatggagtcactcatttttctggccgttcggccttcaggtgaagcggaagagggccagtgtacccgatcgtcttcccaagctctcgccgttcgatgagccccgactcccctcgagacgtctcgggcagtcagggcatgcagagccccgggggcggtcgatttccgaggtttcgacgatgcctatgggccgtacattcttagcgtgagatctttcgaaaccactctcaagtcagtgagttcaactgagacgactcgaacgctatagagtggcagcgtctctgagttcggggcaatcctttccaagcaaatgattctcgtttcaagggagagccatgaacgaacatgaatcacgtcaacccactccactccttcggaacgaatttggggaagagctgggagtccgaagaacgctcggaagtgttccaagggcacaatacttcctcgttcagtcggtgagaaaaaccgaaactacgcaccctgccgcggaagagaagcagatcgtaattgcgggtcggagctcaactcgaacgaaaaggcggagaggaaatcgcacagggacaccggcatttcaatcttcgatggaactgcggcgagctgatgcacgattgttaaaatgcgattgccgcaaggaactcggagggaatcagttatctctgaaccgctcccgaacaaacccatcgtgttcacttgatccagagccagagctgccgccttgagcctgatgaagctgccggaggactacggacggctcctgtttcaagcatcagatgtgcaccgtggaggtgagaactgcatctggcaagaagcggctcccggctaaggcgtcacggcatgaggctccgcaagcgagaattcgagcatagttttggagatcatcatggattaatttacacctgaattcaacaaactctccatatagataaaaacaaagtcatccagaagacgttctcgttcttcgttcagcttggtagcgattagcgatcgtgtcctctcagcaaccgagatcatcgctgtgtcacagattccctgtggatgagatgctcacagagaaactaaagactgaacgaggagcgccccagagtgagttccaatggttcatcggaggacagaagatcgtccccatgattctgtctctggatttggtgacgagcatcgggttctcgacattcaagtctgttgcaattcgcgccctaaaagcatccttggaacaaatgttgcgcttattcatcgtgctcgcaagatcgcatacacgagcgtatcaaggtatggtatgccactggtaagcggccgacctgttgaccgccatcatcggctcacagaacgacctatgagacaagcagtgacgcccactaataagggagaactcatccgagcttgtgcctgcctgggtctccgcaaaagcgccgttcgtctctgttctcaggatgactgacagaaattcctccaacgaaaggtcgaaaaaacatattgacagtgacttgctggagggaatgaaatttgagcgcacgcaagaacagctcgctacacggcaatcgaatccctcgcagaatacggagggctgatcagtgtcaatgacaccaagttcctcagctaactggctgagagaaggctgggtgaggtttgctcgctcgaggtcttgactgaaagaatcgttgaaagattcttggcacgccgcctgacgcccttcgctccaaggtaggaggcacatcacaggatgatcgtgcgcgcagagacgactcttatgacatgcccggggcgctcacactgatattggctgaagtatcgggagtgaaagtgagaaacgacgtgcaagaagtggagagaggaatattcagttctcggatgaggcttgcgccagattgttggagaagtgctccgagggggtcgaaacggattctgaggactcaaaggagatgcggttggtagaagacgtagatctgcaaggagcctccagaatgctttgttcctccatttgggggagctaccaacgcaatgaatctactgcccgcaaaatcaccccacagatcaatcggcgctttctgcgcatgatgtccatgaactgtgaaaatccgccgtactgggaatccagatcgcccgcaaagggcgacacatcacaggtcgtccaggatcgtgaaatctccaactgagttgtgcttttcctccattctggggacttttccgcaaggaaacttggacgatgactggatatgcactaatcccccgtgcatggtccggattgctccgctttgcaccgtttgcgagcggaacccatagacccaggggtcctcgcactttaagcctccggtgcccacggcgtcgcgacatgagctattcgcgcgattggggtagggttcgtcggactcatcgagctgagcagcgcgagcagcttccttcatacacaaaggtgttgagggccaggcctaacatccgttcgaagcggcctgactacacttgctcagcgctctgggcatacttccgagacacccgcgtgcatcggtaagagcgtttcggccgaatttccaccgccagctctcttcctggcgtactgcctcggaaaagaaaaactatgtgatctctcatttggaccgtcgagtaactcgacaacctgtattccgggctgtgtattccgacgggttgagcaggtggataaccaaaacgcagccattcaagcggctcggacgtcggctcgttcagtttcgagtggttgcgaccatttgaatcggaaaaaacaaccatgattcgccgtaagcgtcgaagaagcggaacgccgtatctggccattcagttctaactttgaatcagtgagcttgctagcgatccactcagtcaaccgacggaccggccgagcaagcacacaaccaacgaaccgaccatccagctatccaccatcagtgagtctggctgaacaaggtcgcgaatatcgagcaagccggtcggccggtctgtcgacggggcgacttgattctgagagaccagattccccgaaggtttagttcgtaattcgtgctcccaagagacgcacctccttgagcgagccgtccgtactaggtgtctcgacacaggtcaaaagatctgctgcgacgaagtctgtcattctcggcaatacctcaatggtagtgaagaaagtgaccctccgagaagccgggatccaagccgacgcgagacctcaatgaaggctcggtccgcatcctaaaacaaatcaaactgcaccggctggaatgacggcatctcgggaagaagtgagctaggcaccgaggagcacgcgggtctccgatgagttgttaacctgcgtcgggaaccgagggaacgcccagattgaggagaatcttcccggaagcccccagaattttccaaaagggagaaaatgtgaacaacgcagggaacggaactcatcctgttccaagcgattaatgcaattcgattggagcgcatcgggagaaagttcattccgaagctttgagcgaagcggagtctgccctgatccacggatgaatacgtcgttgatcatgtctgatggcttccagcgggctcaaatgggcggaaagttccgtgtgcgactcgcgagtcatctgagacacctggtttcattgattccaccgtacatgctgaagcgaggcgtgaacaccgggaaggcagcatgtgacgcgtttcgttagggtgcttcgggtcaagtgaaagaacaaaggagagagaagataggcagcgttggccaggttaacttctgggattgaagtgtttgcggctgctcggggggttccgaccgtcaaccggagctgcactatctgcttttatacgcttgtcgttgagggaagcttgagggccgccctgttcatgttcaagggaaacctccattgaaattgcggcgaatattcctcatgtgtgcaatcggtttggatccatacgttaatcgatcaagaatgcacaaacttcatccataaccaacgaggtggcccaatcaagcttcgttttcatcctccgtgctcttatctggccgcggtgtgttcaggtatatctgcacttccatgattcagtggagcagcagagcagtgaacagtcgcacctcaaagtcagctcgtacacttggaagcgcgagctgagcaaatgcgaaagggagcgcggcagatgtttatccgcctgttgcctttgttgaaaacctgtccttcgctcgagttcgttgacagtacgctatccgggcagcctgcacgaattccgagctgattcggctccgtgaagccttccgtaacaccttcaggatcagattgaccggaacttgattcgagattgagtgcttcatcaaattcatctgacattcagtacgctccatttgtggaatcgttggagagcttgaatcccccgcgatgagagctttgagatctgcgcagctttggtgcccagggctctgtcccgcccgggttgcggtgaagatattagaaacaagctaaagaagctcccgtcgcttctcagggcgtgcggagaaggcttccaggccatcgagcaacgctctcgactgccgctctgagtcacttctgcggcgccgcctaatcagagcagataacgatttgcttgcagcaagttcccagatggatagcatgcaaggcggcaccagttgttggagatcgtctgagttcgctggaccatcgctcgataatcactcaggacacgatgcacttcagcagtccctcacggaacgcttttcggagatgagcggcactcaaaactatcttgcctatcgcattgagtcagttgttttcttctttagcgacgagagggatgccatcattcgaatattacacgatgcagaccgtgacgccggtgagataaacgacggtacaaacggtgtgctacacgatcgaacgctgcaggctcagaagctcagcacgaagaactcgccggactttttcgaagaacgtttgattctcatgtcgagattcagattaaggaaactcagtcgacagctgcatggatcaccgacgctttccgcagggagcgtcctcgcggacggatttcagactcgcagtgactcctctgtgcgtgactcctttccaccctacggtacttcgaagtggtcagatgaattcgagatcggtgtaaggagtaccgcaagaatccctagaatgcacaataacagatcgttcaacgctggcgcagaatatcaacattccgaacacatcatgtggtgcaccgagtggtgccacaagctgtgataatatttaaaggtgcgaaaggtgaccgaagatactgtcgcgaagcaggatctttgaacccgtgttaaaactgactcgaacgcccttggctttgacaatgggaaggatgcgcgagctttcggcgaacgccaaaagtgaaatcagctcacgtttcaagaatgaaatgggagtcacaacaagagttacgaggcctcggcttcgagatgttgaaacagatccaagagggagggaaacaataaaatttcgatggcttcacctctaggtgagcgggagtggctgctcgacgcctaggcagaagcaacggcaagtagccaatctcggtacagctctggttattggatctgataggaaggatttccgatggcaagccgtgtggcatctgagaatgatctcacatccgtcgcgaaggggtgcgagtcgaggaataatcggagcattcattcatctagttttgagcacatccccgacccactctcgaaaaccggattcgatcccgagaaaggaccgaatcgataatttgagtgatttggagagctcgttccgaagcttagagattcagatgcctcgtcccgtccggcagctgaggggaaccaaccgctgcagtaaaaccaccggaacaattgagttcgtgagcctgtactctctgctttctgatgcccttgagcgaatggagtcgcggagttcccggagaaatcgttcatccgagcgtttccgtggtgctgaggtcatgggcgatcgagattttgattccaaccgaacgagaatatggcgctcgcgaagtccgagagccgatagcgggaacgccgatagttgaaagttaaatccctacagcatatcgaactccggatcaacatcgaaggaactgaaaatgaacttctggtgctattctcgtttcaattttgagcgtcggacaccagcccggttgtgaaacgtgttttcgacagcgattccgcggcactctccttcagaagagcgtcggagcgccctgtcagcgataggtccatggcataccggagaaaatccgctcgctccccagagcagcatgttgacgacaggccgctgaagcgacggctgtctgctctaggatctgtttggctcgactttctgggtgtgaatttaatactgcattgggaggtcaacgactctacttcagttcctttcatttaatttcaccggggaaatatttcgagtcgagaaagccagccctactcgacaataccagattgatcgcgagattccatggacatagatgcgccaaacggaaaccagaacatttccgttgacagtcggtccaatcgaagggagggtttgcgaaggctagatcatccagagatgacggggacctgtaaatatgatggaggttggggaggaggagtcgggaacggagagaccgtgaagtcgatcaataccacacctctgggacgtttagagtgccgagcctcagattaacgacaatgagaaatgtgccgttttcgaccggaaaaagcccctctgactcataaatcgaccgtgagcacacgcaaatgggctgagcttgtgttgatgaagctacgactccccggatagtgattgagacgaaccgaacgagaagtaacaacaagtatttagtacgcgtccgcatctgtagcaacgcccacaacgctcgctttcgtatgccaccaatgcgacaattacgcgagagttccgcgtattatgggaaaagacgcggtcagtatcttcggaatcgagagcccccgattgtcatagttctatccgaagccttgactcgtgaaaacgggctcagagaaaactgtctatcagacttggggagaactcgttatccgtgacggtacgataaccgctagtcgatcgagtccgaacgatcctgtagctcgacttggttgcgggctctgcaccgcttatcggaatcgttcgatgacattcgtgatgattctctctgaccgccggcaccggttataagctctccgtatggatatcattttgaggaagatggaacaccacggcctggaatgggatcaatccactcagccaacctaattcctgtggatgaatgatatggctgaaccggaaacgaaccaagtgagtgtatttcagcacctataaacaacggaagtcttcaccacacacgcaacacagagtcattcggaaataccaggtactcagggtactgatcagatcacgcagatcgcgtcataaactataaacgtacggggaatcgaactgaatgagccgcagggctcatcgttctttgtgcgaatcactgaagttcataaggtgacccattccgatcaattcggagttcccggagtaacagtgagcagacctcccaggagcctcgccgattccaggtcaaaattcccctctgtcggtctatatacgatccctttgtttttgtacacatacggtaaacgtaatacccagtaggcactctgagttagagtaacagtttcgaatgggaaaaagacgggtgcagaaggagctggttgcactctgggttccagggtgacgtccacggcgagcttaggagttacgatgtggattcgcattagttgagcgttggcctgacatgagcacggacacggatagtagaggggcatcggggaagacacgatcttattcgcggtttccttcacgagccccgacgatgtagacctggaaacacaacgaattctgaatggagtcgagcttggatcgtaacgcaacacttgcagcggggcgcgtcgaactcttgtcacttaaggcggaccacagcaccagatggtgagcccaccgacgaaggcctcgtgcgatcacaaccggaactcacctgaggatgctgtcgggcgccgacatcatgaaccttttcccttcaggacattcatattcgagtccgatgaagattttcacggccctggtagttcctttgcgggtatcgccgctcgcctccagagtttctttggggaaatccaacttcgtgtcccagggcaacaagaagttacttccggggaaaaaagctttctgatcaacgatgccgcttttgtgagagtacctcgatgaaggcccgacacaaacacaactccacgaagggaatttcgggatgaatggagtctgggtgcaggtcatgtcggcttcgctttcctcgtccgatgcgaactcaagatgttcgagttcggcgcagcagtccgccatctcgtaaaactcgaaattggccgcgatcagcttgaaaggatctggtcgagtcatgtgagatcgcccacagttgcaaacggacagatagtggactcgcgcctcgtgttcacccgtttcgtggatcggtttcacgcacccgaacccggtgagactctgcaagaagcgaaggtgtcgatggagtcacgccgatccccgaaacatgggcggccgcggagagcttcgacaagcgaagagcaacgagctgactcaccttctctttgcaggactcgtgtccatccttccagtacctgtcacattcttgacggagttcctcgaccagcttgtgtactgtcggcccctttgctttggccttgaacactttcacggcataggccatacgggcctgatggacgaactcgtcgtagaacttggggagatttgttttgtaggcttgcacggcgacagggtaggccttcgcacatcggacctcactaaacttagcgtcgatgtctatttcattgacgttccggaagaagtgcaccattttctcgtaagttgtcacccatttgtggagtttcggaagtctgaaatacgctaaccctgcgtttcggccaacgttgtcgttgaaaccttctttgaacgcaagtctagtgtggccctctatgaacgggaggcagttttcgtgaccgacatgaacgaaggagcgggtggttgggatggcgaacagagaattcccacagttgttggtgacgattctactccgtcggagagttctgcgtgaagagaaaccccgatgaaactctaccttcactgactcatcctcacaggctcgacctctaacctaaaactaagagccgcttgcccacctgtatatgaggtcctccatatttgtgcagatgtttggaaggtcatccaggctcggcatgagtagaaaaagcgcgcgcggagaacaataccttcgaaagagggatggaactattcatgggaccgattggcttcgaatgagcctcaaataataagaaagaatcagaggacgatccaaaagcttgtcgggcgcgatccccatctccaagcgctcgtacctcccagcgggtcgatcgaacttcttctgaagttgctccttattcttcagccgaacggcatccagtcgtcggaaccattgcaaatattgcacgtccagctgccatgtgtttgccacgaacacaagcagatggctcacgtgcaaatacgggagggctttgatcgagagctcgcatgacagatagatggttctgaagaaattcaagaatcgggattgaaggcgaattcgaggtaaaattgagggtgaatgtttggcgatgagtttcctccaacgggagggtatcttctcatcgtggccctcgggatttatctacctgtttgcagaatcgtagtagaagcgcgaatcactgaacagatttgtgcacgttccatcaactctcgctttggaaacaaatgtgacgatgcagacctgaagttacatcacctttcagcgagtatgtcaccatcataggagtcctgagagaatcgattcagagctagtctcacctcatcgtccggatggtccaagagtgttttcacggtcgtctcgtcgaaatccatgactggagagatttttgtatattctggtaatattctggcggagctcgaagcgaccgtccacttaggttatatcgtactgggttgatgacagctcactgcagtctcaggtctacatcctcgatcagagaacagctggtcacacgcgttgctctggttcttagaaactgtgaacttcgaattcgatggaacccctattgacgccagggagcagaaattgtgttgttcggatgagggcgcggccatcttggaatttcgaaacggttagtaccataaatgatgatctcgatccaaagttcattctgtatgcgagccagttcttcattgcggcccgtcatttattcccgagcatcgaatgagcgtgattcgtcagaccccgatcccccgtgatcacgagactcacaatttccgacagacaaatttgaatttggcgctgctgtcatccagcgtgttatgctgttaactggaatcggtgtgcagaccatctcgtgagtcggcactttgttatttgaagctaccgtcgttttgtgcagttactaatatctcttgaaggtttgttgaatgacgaaatcttgtttatagatccacagtgctaggaccttaccagacggaacctgatctcgcaagatataggtgcgagtttttcaccgactactcaacttttgccgacatactccgggccggttgccggaccgcggatgatcagtgcgacatcctctgatccccgggagagttaagatctttcacaaagcgcgccagccctactgctattcatcgtgatcattcggaagatggatctcaaggactgtcctgttttcctgtgctcgaagctgtcagacataagaattttgcctggactgaagggagcgatgaacagatccggtcctaaatcgacaactcgcgtcacaagctaacgaaagtgactgtaacaattccccctccgtgctcatttcgcggtagttcccgcgagatgcagcttcctgaatcgtttacagttagctacagtatgcagcctgggcttctttgtgcaatgcgtccgctgcctacacctcggaggaagttcccacgttccaaacggtgattctcctctttgccggcttctcgactggcgaaagctctgaatacagtagtttcccccctcaacagcttctcttcggaggacctaatgtgcgcgctaggctgatggagtttctggggcaacgatggaagccacagaatgcattcttctcccgcggatgcggagctaaagcattgatgaatagattttcctgaatgggtcttctgcattgctctcacagatgtatcgtaaccagtacgacaatgacgtcacggtgtggagcccccaaggtcgactacatcaggtcgaatatgcgatggaagcagtgaagcagggatctgccacaatcggtttaaaaaatgaagactatgctgttcttctggccctgaagcgggcatcttccgagctctcggcccatcagaaaaaaatcatacccatcgatcgccacgtaggagtctctctggcaggtcagtggcaacgattctggattaccacttcatccgatcagactccaacgtgttttgaggaaaccgctcctgggccgcctatcgtcggctcggaggagctcctccgagagactgaacgacccctcgtactgatacatgcgttggtttcaggcttaaccgccgatgctcgcgtactctcaaagttcatgcgcagcgagtgtctgaaccacagattcgcctacgacgcatcgctccccattgcgaaattggttacatgtatggggaacagaatgcaatcatgcactcagggttacgatagacgtccctatggagtcgggcttttgatagcgggatacgacgacaatggccctcagatctatcaaacgtgtccgtcggccaatttctacaactgtaaagcgatggctatcggcgcccgcagtcagtctgcgagaacctatctcgagaagcatctcgatgtctttaggcagtgagttcagctatatctctcgtgaatttcggctgccacaatgagtatcgatcatttcccattaaacgctcgattatcccacagagcttctctggacgacttggtgagacacggtctccgaggactccgagactgtttaccgaacgacgttgatctcagcagtaaaaacgtttcgatcgctatcgtcggcaaggaccggaacttcaccatatatgaggatgaagcatgtgaaccgtacttgaacatgataacgggcgaagaacggactcgtggtgagcggccagcggcaggggatgatcctgaggcaatggaacggtagaccatcccgcatgaatacctgagaggttcaaggcgctttattgacgggctcactatcgctcattcaatggaaatacgacgagtttgtttgcctcctcatcatgaataaaacatcaatcgcaaggtttttactcgaaacggcgaaacatcgtgtactctttcggaacgatcgaagtcggctcacagtatgcgatcgacacaaagatattttgccctgacatctcctcatgaggcagctctcattgtcctggaaagcgcgaccgcgtacatcgaacaccttcagagcaactatttcctcacccatcgaagtattctgcgacggagtttgatatccgaatcttcattggactctgactccaataactttatcggtcttccgtggttcctgatggtgttccattccaaatcattacgcatctcatcaacggtatattggttgcttatgatgtttgccaggattacttcgaagcagtgctcctggaatacgaggcaggatttcgggtctagtcgcatcgaccctcttcacatcaacgctttcatcatcatctgcctcaacaacaatgatccccatcatcattctctcacgtgtcctgagagcgcccgatacagttgctctcagtcactcatttgagtgtccctacgagctgtcccgattatggtgtagtgaccgagggtgacaggtggagagttcgttcacagtgaaatcagaaaccctgctggacaacgggcccggtagcagtcgccagaaactcttgaacaatggctggcgataggaataagttcgattatcacggcaagaaaatattagcgcccatggttcgggtgggaacgttgccgacacgtcttctggcgttgcagttcggcgcggatcttgtgtattcggaagaactcatagactatcggctcttgaagtgcaaacgcgtggagaacactctcctcgggagcatcgactacatcgatgctgagaaccagatagtttatagaacctgcgcggccgaaaaaggacgtaacatcgttcagataggaacgtgtagcccggaaagagccgtgcaggtggctgagatggtcaaacgagatgttgccggtatcgacgttaacatgggttgtccaaaagagttctcaatcaagggcaatatgggcgctgcgctgttaactcagcctgagacaatcgaagccatcatgagcgcactacgtaaagcagctccagatctactcgtcacgtgcaaaattcgcgttttcgctgacgtcgaaagaaccatacagctctgcaaacgcatcgaagctgttgggatcgatgccatcggtgttcatggtcgaacaagagacgaaagaccacaacacgcgaaccgaaacgccacaattaaagccgtagcggacgcgttgaagatccctgtcatcgcgaacggcgggtcttcggagatccgatgttacgaagacatcgataagttccgccggacctgtggagctgcagcaatcatgatcgctagacaggcggaggaaaatgtatccattttccgggaagagggcatactcggctggcgggagctcgttatgagatatctgaggctcgccattgagtgggacaaccgttttccgaacacgaagtactgcatccagcggatcctcggatcgcttcaagaatcaacagacgaaggccggaaattcctccagtcccggtgcatggaagacatttgtgatatttggggtctacgcgatctcttcgaagaaaagaagtcccagtggaaagccagcggacgagagctgatcggtgattatgagcacaagggcagaggtgtcaagaggaagttggagaatgaaccgaacacgtttggcatcgaagcgaagttctgccggaacctttttggtatgtccgatctcccaaaaacggttctcctgaataagagtcgcgcagaaggtctccagcaaccggactatgagataattgcggtcgacaagatgttccgtgcggttgtagaatacgatggaaggaagtacacgagctttttccgtgagaagaataagcgaatggcggaacaaggagcagctttggtctgtcttttcgcgcttggcgtcatgggggatgacaagatccgaggcgagtcggaggcgaaactcttcgctgagagtcagaagaacgcctgaatgagaatcacggggcagcattgtcttccgtggatccctgtgttccccctccaatgctgttcgatcgctgactcctgttatttctggaaattcatgacccatgaggaggatctctatatgattgtgagaatgggataggccaaacctggaggatttcaatgaatataaatttatctctctcgagacaaacactgttcactctttatttagcgttcatgtagatttcttccgaaaaaatgcttgtgtcaacggcaactatttctgccgcgacccggccgactacaatatcaccaagaactgactatagaactgccttacgtcaaaatatacgcggacaggatggggtttcacaacacacacctacgaagacatgtagacgtaagcaaagagggaaatatacctgctacaagacaatgatccgtggttagcatttcctggcactattcatcttctgttcggtacggatcgtcgatgtgtcggacacaacgctttcgacgtcatccgtttgcattgagtaccgtccttattcgttccctggcatcgggttttttccaagccagactggtgcgtcgatgttgagtagtcgcttgcagcaacagaagcctggaattcactcaacggaatgtccttactgacgtcaccgaatctctacagataatgcctatctcgtttgtttcatgtattgctcacttgatcccattcacagttttcatcttgattcacgaagttacacgatgcggcctatcaagaaatgttcacgttagtcaccggtcgcctcgattttccgattaccctggaatcccgcagataacgaaccctttttttcctatcccctctgaaaataacgcatctgataacgaactcatcggatactgaaacattcgaataactaactcgtcagctcatcagatagcgaactcggcagatagcgatctcatctgacgcggtttttcgagaggaaaccggaaaaaaagtctcgtgaccgaagggattttagggtgcattgaatgctgtgagaatttcgatagcagagggagaaagatctctccaaaatggactaggttacttgcaatgaatttctccaattccgaaggggtataattctctttggtgggcgcgtccttgaccggtgacagtaaagctatgtcattcatgcgctgctccatgctgaaatgtgcggactggttgataagctgaaaccaagtggcagacacgtacatgagagccaacagatactcagtttttcactgacgtttttatggtctccacaagtcgatagaactcttctttggatgctggcctatgtttcgttttcagtctcttcaggactatctccacaacagatacggcagcgaccgagacgagcagttccaacagagaagcgtgatactctgaaatgttttgtcgcaatcaatgcgtaggtctcagagaatctccggacttcacttgcaacttccccttgagtacacatgtcgaaaacagcgatggcgcctgcgccaagtccacctcatcgtgctccccaactgatctccttcactgaatcctctcttatgacatgaagcatcctacctgaagtcagtttaagatagcaattcaacggaatcgcagtgatgatggttacgcgactgacgaacgggaagtgcaggaaggagccgaaaaccatgagcactgtgagcagtccgaggtggcttgcaaataatgatgccatatcactgttcactgcagagttaagaagtttatacgataaggcagtgcaaccgcagttactcaggcatcagcgttgaaactgtcatctcccgcatcctaccgttgttttcggcgaggagcgactgcgcccagtcggtatgtttactgatgaaatcctgggcagtcatcaagagattgccaagagctcccagtgattcgttaacctttgtgatgctctcgagactggcttgcacctggaagaattcacatatttctcaacgattcagttgatggaagttgctaatgtgtcgagagtcgagagccacagttcggtgcaattcgaaaattatctcagatcatatcccgagcccaatcggctgtaaaggaagcaaaaagattctgagatcatggagtcatcgatcctgagatctcaccttgaggtaagtgaggtcctggatcgcgagaagattatcaccgcgactttccagttccgacaggagttcccgcagtgagttctcgtaaagtttcataatctggtccatcgtctgcctttgaattttcagaagttcttcctgtcgttcaacctcagcaactgtggagtctgaaggagagttgatcagaatctgggattaacaatcttgccacggtcgtaatcttatctgtccaccgaaatttccaacagtcgtcccctcgaacacggtccccaaaagatgtcagcgggtagcattcccggaactcaaaacaatatggcgtacatcgagtcgctgaagtctccgcgacgcgtgtacattttggagcagcatcatagcttcagagtcccacgaaggaaggagtgtagatcatcgagagaaatttaccgagatgtgacttgacttcattcgttatcttgatcagttgatggcttccactctcgagtatcttctgatccgtagacagttgcatcacgttctcattcagagcattctccaaagctttctgtttggcaaggagttcctcgtgacgattcaccatcgactcatgctgaccgttcaggacattcatttgttcggccgcggacgcttgaagattcatcagctacaaatatcgcagaacgggacttggtttgtcattgatatcgggtttcttcttcagtcattcattcaaagcaccttcgtgcaacggattcggatccacaaccccgataactccgggaatgatccaaaaaactcaccttgccgtgccagtcgtgcatttctctgagattccccaattgatcttgagaagcactggaaagatgactgaccaacatttcggttcgtgcgcggaatagctgctggttcacagagtggcacacagctagcgcgcgatttgtcatcaactggtagacagtccaggagttgggatccatagttttggtgcaatcagccaagctcatgctgctcttgcaagggaactggggtctgactgggagcagaaaaatcggtaaggctgttgtgtgggttgctctcgtatggttgcttttactcagtcaatgatgtcgaggagcgtcgatgagaataacgaatttactgaatccatggcactcacgctcaatcgcattttgacagttgaggagattcacggccattttccctatgtgttcttcgtcaagctgggcgcacttcttccgcaagctcaggaccagtctccgatgacagtcggcaagcggagtgtcgtttccgacagcttcgagatcgagtttcttcgcctctaggaggaatctctcatctgtaggtgtcaaatcgaatgcgactttgacctggagtgcctgcaatcgggggaacatgagatttccgggaacaaagcttcttagggggatcaccagaatgatccttgcgaactggtttgactctcatactccacgcagatgcaagagcacgcctcatgaaatctccgtcccctccacgagatctgccgatctgattcgagtttgtgacgacgaactccaagtcggatatatcgacagagtccttcggaatagatttcttcttactcacggcagtggaatccatcgagtttgccgttttcgacatggtttcctctccattgaacacccatttaaaaatgggcagaaacgagaccacacaaaccgggtaggaaaccaatatgagcccgacaattagattcatgttgacagcccggcgggtgtttagagggatccgcgctgggtcaaatttgatttcaagcctgaaggaaactgaggatcgtttacatttgaagtctgttttcttccctcagcacacaactgcccggttctgcaccgacatgaatactcgacgctgattggtggcttgctgcgggacgtcatccagaggcgccaaaacttgaaaaagctccactttgatagtaacccaggatgaattgctcggtaaatacgagaagcgatccgggatatccgacggggatcgaagccgatccagatccatcggagttctcgagcttgatcaatttctggggtgcgtccagtcttcacagcacgcgaccgccaaacacgttgcagagagcggccgttcacgagtgttttcctcctgatcagctgttggcatcgagcaccgcgcggttcgttaactcgattcttaggaggaaaactccgtatagaattggttatcgcatcgagtgacaccgaagcttggtttttgttctgtctcggtggcaagctgagaagtctcaggggcccgtttggtggaaaattagccaggatgctgccttcagcatctaaatgtagcttgatgttgaaatcgaggtaagccatgaacggctctgtggtcctctaaacaagttcattgaggatggcaagctggtcgactagaccccgcggttccgtttcagcgtgtgaccaagtttgcaatgggattgcggagctcaaataagagccggtcttttaatgcttcgccgacggtcgcgaactctactgcttgagcggtatgaataacaaacagtgctgagagcaatccccatgagtgacaagttttccccacatattttgcagtctagtttcgatcttcccctacagcattcgacctgggagctcattggtcaaacgataggtctcgctcaccatgcgttgtgttggagtgagaccggaagtgttcctcattcgttgaggaggtggatggggtcccgtgtattggatcacaaggtctgcgcgggcttgactccgaaagctgccccgagatgacgacgtcgcaaacgcttgctttctcacatagacaaggagaaacattgtcgcaaattttccagtttcattcagggaaattcagaaagctgaggtgcgggataatttccgggggaactcgaacctcttcgccaaagcatcttccgaaattccgcaaaagactgggacgattctcatgatctcgacacgaatgataggaagtgcacgtgtgagcgtggttcggtggacgacttcatgggtccgagagcacctctgcttttgactgcggattttctcagtttgatccacgctgttagtagttccccgcacatatcataggcaggtttcggaatcatctcccgtttgcgggcgcactgcgcagccattgttggaatgcggagcagagacgcgggctccgactcttgatcgagttggaagctccgattccgagaagaatattcgggtagagtgattctaggaggacacggacgaacaggaggtaaatgcgttgtggatttgtgtccagaagggtacgtcgcgctgagttcggggaacttttcttggagcttcaggatgctagatgcgagcttgaatccaaggtgtaatctgattttattctgaagtttcctccatgcctaaaattcggaagcatgcaaaagcatgcagttgacaactgaggctcccgccatggtgcatgttgcagcacactatgaagcgcccacagcgcgtgtgataatggaatcaaatcacgtattccacttcaaacgatcctaattctcttagattcccaataggtttctaagacccgctccagtctaactcctcatctagagtcgtgggactcacaaagacggacgactgcttacaattaacggatcgggggctgcagcttgctcattcaacgagcatctctcataattccccacggcgacggtgtgctttgtcccgagcgggatcatcctggaggcgaaactagaataagaagcttacgcgggacagaatgccgcacaagctacaacgtcaatggacaagcccatattcggtagaagaattatggatgatcaatacgccgtggaacaaccgaagcgctccatgtcccaatttggttgaatcgattcgttgatggttttctaaaggcgaaaaatcgtcattcctaactatctcttctgcccacagtatgccatcgagctcaacgagtaaccgcctccgatatcttcatcgctccacaaagcggaaactcgtgttcggaatcgaaactagctgtgatgacactgcgatggccgtcgtggatgatgcaggtgagttatatttcgtccaatgcccgttcaccatgcgcagaaagtctctttcacctgcccagcgggatagaccccgagcgtccctgaaagttacgtttcgagcgagccacaagaaaatcgacgtccagtcttgatcagttgggattcctcctagattgaggccgagaaacatcgaggagcgccaaattgtggcgaaccgagcttcaatcatggtcggctttggcatcgactgtggccacactcgattcagaaccatgaaggatgttcaagattgccgcggggaggcacagaaactcagctttcacttgagaccgtctctgggatcgggttacaggaaggaagacaggagtccttcgattgggcaggcacttgtcggaggagtgattcacgccgagagatcgcgtttcgacacaagcaaagctcccgtctccgtttccagtcgatcatactggtcgccgctcatcagttcttcggcaacaccgtgactgtcgctgatattgattcagacatcagggacgcggtcggcgacgattcctctttgggtcccgctcgtggttccatcgttagcactcaatcgatccatttcgcggtcagtgttttgtgttcgatagcctctgcctctttgagtgaggtacacgtcagaagtagttccggagaacatttgatctgtcgagaataacctcatgactcatgcgctgcatagaagttctcggatcagcggaagtttccctttaacagaatgaatgatacttcatagaggctggtttccaaattcgtgagccagcacctgcatttaggattgtgtgacgggctttcccgtcgtcgtgctcattcacgcagcgaatcttcgctcagttggcttccgctgcactcgaacaatcaccggtacttcacaaccaataacaatgctgcgatcgagatggttccgacgattccgctcgatcccggtgtctgaaaaactccacgtctaactagatctcgtccgggcagaggacgattctttcatcgatgtcgagatgcgcttccatcctttctccattgccatcccgcgatccaatgctatagatccaatgctatagaatgccgtacgcccgctagacgtactttgagaaccatgcatatgtacttgatgattgagtccccgggcgggcattattcacgctgaacctcaaccaaaatcccagatctggaacaggctgaaactcgtagactttcgagaacgatggtctactccacgggatttgctcgaagccgcagaagactcgctggccctcgctcctaacgactgggagaggatttcgaaacgttttccgtttttttccaggatttgatccgctcttccaatcagcagagattgtcaggaacaaggattctgagtcaatgtaaaacattccagggaatatcctcggggaagcctatcaatcgcagctccaaacgcacgttagcttcggcggaataatacctacgatcgccagggatctgcatatcctgaacattcacaaagttcatcaagacactttggcccgggctggcatcgatccacaagaaatcgatgccgtggccgtcaccaacaagccgggcatggcactgagtttaggagtacgtcgatcgctgcatgttttaattctactccgtcctcctggtaacggatgcactgtatgtcgagtgtggggcgcttccaacaaccaactatttgacggaaaccacttttctctcattcttaggtcggcctggagcacgcaaagagattctgcaaagaaaactcccttcccttgatccccatccatcatatgcaagctcatgctttggttgttcggtgtggatgctccgtggatttcccatacctcgtcttgctagtctccggtgggcattgtcaggtgcgttgaggagagcgcacgcagccccgacaatgcgccagcgctcaagccgctgatggaagcggtggcgagtttgcatggtgcaggtgtgctcaatggttttttcgtactcgtttgacatttaatatctcgtccccgaaggtagctgttgtcagggacgtgacggactttgcgttgctcggcaccacgcttgacgatgcgccaggtgaagctcttgacaaaatagcccggcgacttaaactgagtaaccttcgagaattccgaggactcagcggaggggccagtatcgaaatcctcgctaaacgaggcaatccgacatcgatgcagtacacccaaccgatgacccatcgcagggattgtgcattctcattttcaggtaatatgagacactcttatcctgagaaaatttcccgatttggatgcctgtcaattccagcgtttcgggtcgaccgagagatcgaggagcggtccctccgcctcgtctcctttgtcaattttcgggccagcaaggacaggcctcccgcacagaagtcgcagaccgtcgttggtttttggatgagaacgatagcccctgactatcacagcgacgaaagcggaaccgagctgaagataaaattcccttcggattgcgacgaagacattttcacacccgagcggttggatgcccgatttctcgattcgccactttcgggaaacgtatcgaagtatttctttgaaatttttaggtttcaagtccaagactcagcgcatagcacggcactacgaagaggagtttgggatccgtggagacggagttctgccgaacgtagctgacgtttgcgccagcgtgcaattttatatatgtcagcacatcatgaagcgagtctggagggctatgctttattgccggcgcatggacatcgatttcgggaaccgacttgttatatcaggtagtcccgacgtttcccctctggagagattggctggagtctttcccgaattcactttgcataccagggactggaagggccagacattgaaccctgttttttgaatctcgtctcagatgactctaataatagccgacaacctaaaatcccactcactccaagagcactgctacctgttaggtcagtgcccatggcaggcgttgctcaccgtataaacctcctagttacatctcactttcgttgccccgattctgccagtcaatcaaatcccatcgtacccgtatgctttcatcagagctcgtatgcagcggcgacgatcgtgacgcaaaccgtctaggtgtgttttcaggaggagtcgcgtgcagcacttacctccgtatgttcatgaaacagctgtgcgaacgtgaggacgtggatctcttcgttccacccgcgagactgtgctcagacaacggtgtgatgatcgcttggaacggcatggagaggcttcgagctggcgagcgaccaataccccacctggaggtggacgaactctgtttcgagtcaagagctcccctaggcgatgaccttaccgatgacatcatggaggaaggcattcaaatccctcgatggaaaattgatttgggaagattgctcaaggatacgggcaatatcttcgccgacgagttcacgtcagcccccgaaaaaacgccaaacgatgaaaacggggaaagttcagaagtcatggaatcggacgaaattcagaaaggtggaggtagcaaagccgtcagctgaaacgactgtcgagggcctggaattgtgggttgcgcgctgaccaagaattccggaagctaaatgggaagagtttgacgctggtgctgaatgcatggatgacgagagaggggtctccaacttggaccaggggtatcttccattacatgtagttgaggatcgggctccgcagagccgtgacacggatgtgggaaaaatcgcgcaaccgcttcctcccgggatgaatgcagaactgccacgagggttgagagcacagatctgactatatgtttggacaaatgcggtcgcgacccgtaggagtcggatcggatggaaaagaagcagttgtgtactcaggacaaacattccccttcttgattcccccggtttcctgcgcaagacagattcgcatgccagtgagtcatcatatatgcaaagcccgagtcgttgtgttccctgcaccctgcaattagttgcctagtcgctgtactactcaagcatcagaacgtcccagaggaaaagattgtgccctgacattacacctccgtcgcctccatgtctccaccgacgacttgattcctccagaatgtcctgctcgttcgacagggcaggaaactcacactcagaagctaatttcaaaagactgagaagctcgtgagtcgattagtcatgtatgccgaaaacgaatccacgtgtggaacattgtctgagcttgatgggttattgtaggatcgtttcggaacgtcgtcaacttccattgtgagaataaattagttccctgtacatgtaccatcctgttctccgcccgagcgattgttggttccgtttcctgtagcttcattgtgcaagttcaaattttgagttggaactcggacccttctcgaaggattccttcagggaatcagctgtgtagagtgtgaaggagagagagagagagaaatgttcttgcttgagcctttagcagtctgcccccgcacagcgttcgtccacggcacaatacacgagctcttttcctgccagcagggcagaaaaactgtcagcatggcaaccatcttctcttgcatgactttggatgatatggtgagagaactatgatgaaacctgctatatggaatcgaccccgtccatcccatcttcgtcagttcgagtaattgagtagtcgtttccacagcgatagtcttcaaatgagacacttaggttcttacctcaagggagtagcgcggatgaaaaacagggaggttttgtagaatcaacgtttatattcatatatgaataaaataaggaccatgtttcacaccaattcactgctttccagaattatagacaaatactgtattgtgtttgtaagcgctgaggtcgatcgcctccagcacctcatactccaggtatttaagatctggtatcgaaataatggatttgttaacaatctctataacattaggtatcgtatctacgcgtacctaagaacaattcgagagatgttctgctcacattcatgtttcttatttgtgattcgcgtccacggttcataacacctgttggacttgaacacgattaaggatttacaaacgattcaaggaccgtggaattgactggaccagaccccgctggatctaactgcggtggatacagttgtctttcctgtctggttggttggttggtcggtgggttgtttgattgattggattcctacgtacctggtaggtttgtcaatgacttcacagtctatctcagttattacatggtttttgtgttgcttatgtattcattgagaggctagtagaagtattagttgattgtttccattggagtttacactgacgagttgcctgctcctatcatcggctcggatcgttcaacgattccgtcgctcagggcatcctcgtttatcaacatttcttgtctgagatgatctcgttatgggatgcaagcacgttttcattgcatgggaatagaaacgtgttttcgaaggttgaatcgacgcttcatcgtgaatgcgacgatcacagcgatgaacccggctcgacgcaaacgcgtgtcgccagaggccgacctggggttgagcgaggttcgcccttacgtgactaagccgaatgtcacggtttttcaacaggttcgctgtgatcgaccgttggaagtgacgcatgctgttcttccgcttgcatgttcccggcttaaaaggaactgcgaaatcaatggggtcggaatacaggcttcaaacgacactgggcgtcattacacgggtccttttcgatttttctccgtcgtcagtgtgatctctgccgatgcttctccatttagtggatgcaattctcactcgtgaactatcgcagctcagtaaacaagtctcaatcacatcaacaacatcctcatgttctgtgttctcatattcatcttcaatatacgcacgggaacctgttcccatgttggcttcccgaaaatttcgccgttccacggaagtctctggaattggaacaaggtgtgtcgctcgataaatcgctcggtagtgtccaatccagattttccggctcacagcgaaacgccgccgtttagtcgtgctcaacggtgggggtctgtctgccttggtcagcaattcgcaacaaggcttggttggagagttgcgtggatatctccgcgtttccattctcgcggaaatgagatcagagtacgggcccatcagatcgttcaacgtgggaaactctctcaattcaagattcataatgcccccacgagcgctttcgttcgtgaagtcttcaagcttctgcgaaaggtcgtctgctcatagctctcaagttagcgctaccttggcgcgtcgggctcgcggaaagcctcgagtatagacatatgtatgtacatatgagcacatacacatgtgacaggtattccatcactcaatgtttgatgtagctgctttgcaattagactgcagcggcttcggttgaatcgcccgcaacaggcatcagtcctctatgatctacagactcagcctcttcgacagctgcattgatagctgtagcatcaaaatcagctgagcgtgatagaacgcatctctcgttctggaggcgagaaactcgatagaatttccgttatcccctgatttcttcaggtcgtggtcacggccgagtaccatgccaggatcggacacagctgaaaatcgtatcaactggctatgtcgatggcacggggaagaatcgccacgggttgcgattcgtttccatctatgactagggttgttagtttcagtctcagcagctgttgttccttctcgtgccgcgtcgtgaagattcacgaaaagaagcatactctcttctccggaggtctagaaagacggtacagaagattccctcattaaggtttacagatcacatgcattttcacgaaatcgagggcgaagatacgctaaagggtcacaaactagagcttgaacttgatgatatgcagtccacagtagtctatatgcgcgcgaactcctcccgtacccaatggaaaatcttaatcattgccgatttcggattatttttcctttccttctgtctatccgtccaaatgccatgacgccatgattgttgacatatccaccaattcggaaccgatcttcttatgcctctccatctcttttgaacggctctgagattgattcgaaccgagtccgattcacttgagatccgggagagtcggggttcgagagcaatatactccgttttcggtaatttcgcgggaatattgtttcgctgcagcttgcagcatgtgtagatggagatgctcgcagccagcaagcttcaagcctccgtcatgatcggaaccgattaggattctaggtggatttcacgagaatcaaaattgacaacttttggctagcaagttcgcgcccatgaatcaatccgaaaagtctacacttctgagggcagtacttcaggggggaggggtaccaacgagaaattagacctcctttctcagcagtggaaatagaaaaccgtagtagtagtggtagtggatagtaggagaagacgaaggagaagttctacagcggtcgtcgaagtagtagttgttctgcctgagtacttggtggtcacagtaggagaaaatgaggcattcaatggtacgataggtcattcgttgccctgctgctgcggagtatcgcagcagctggcatagatctgttctcaaacgggaatcgagatgaaaatcttcagtatgttctgcttcgaaatgtcgggccccgtcagcgcgctcacctccgattgcggaatggagcggaacgaacgtctgactggagaggcctcgtttcggcaaaaccaaaaccgttggaaatggagtctcttcttctttaaattcttactgtcaatggtagggtcggactgtggtccaagtaattgttgtagggttccgtcctgtaacatctgttttttcgcttttcgggagataagcactttgattggagagaggatcaagctctggcgtgacgtcaacagagatcctgctttctttcattccgaagcaggctgagagaagatcataagcacagcagtcgatagcagttggatgggtctaaaatcgggtaagtctgggaggagaaaataggtagcgggcacttgcgagctacgaaagaatagctgaattatttctgcaagggtcgttgaggttagaggcagattctgaggatgcacaggccccaagggttctcctgtctcagggagccccatgggagctttgaagttcacaggctcagagcgaagcgtgttggaaggggctgtgttttgagagagctcgtagagcggttgtggctcctgatgtcccggagatacgatatcgggctacactccgtatagttcgggacttgacacaaattttcagagcttcctgtgggcagattcgagccgattctgaagctcatgctccggttagagaaaattgaatattcaaggcatgtgctcggaaaagcaggcacattgtgatcgatcagctaaaggaatccacgaactccgtaagaaaaccttacgtgagaatcgcttttccgttcatcgttcccgttctccctaatttctcattgagtttgtgaacaggtgattgtacaagtgcccaacgagatcatgacattgacagaggggggggggagaggaatgtgtaattccaaagaattttagtgaatttacgcagatgaaatctgttcagctgatggtctcgtgtgagagatttttttgttcaggcagcaaccgattcagtccctaattgccgatgagtcatcgacctcatccaaattgagcagtgctgaatcagggccgatctcccccctccggatgcttcggaggaattcgatgattccacaggaaatcgaatcgtattcgggtgggcgaggcatcatcatgacctcatctcatcccaatccagctgtccgttgctccgtcgagttgctggcgttgacagcggatgtgaggatgagcgttcgcaaatgtagaaactactttggctgttgctctcgtgtacatatcgtgcaggcggttgctttcgtgcagttatcgctgcgtcttctccggaatacatgagtgagtgggtggttcgcaagttgagtggtggggaaggtgatcgggccagtggaggatggttgctcgcgtgaactgttcgagatgaacgcatgcaatgcattcagactaaattcttttcgttcccattttccgaggtagaagctttgctttcgtgtgatcacaccgattgcggcagtaattcatacgatcgcagctgacaagtaattgatttcggtggtacgacggctctttgcagtaacgatccccgatgtgatcagagcgtccgctctgaaaacgttccggcctcgaagcagacatgtgaaacaggttttgttgacgtatcgtgtcgaaagcaaggtggagggactcaggaaggataaggcagggtgattgggaaggtgggggaaatcgggagaattccccgtggctttgaaagaagtgtcaagacggtaaagatgtgccaagctgttgggacacgaggattttccgtcgggatttccatggttttcctcctcatggacgtacgcgcagagaggttcatacgtacggttgcttgtgtattctcgcgctgtagctcgtcaggtttcatcgttgatcgttgtgctttcgccctggctgcctcggtctcgcaccttcactccgtttgactcgtacgctgaagcatgtctgcacctcctcgcagtccgaaattacgctaaaagattcacaaccgtcgattttcggcgcttttcggctgccgtcatttcaactctcaacaactttttggaatagagtgagctgggagcgcactccgagccacacaagtacgggcctggttcattttgatcctcggcgttctctgctgttgcctaatgttctaattatcggagtccgcgaccttcgactgtggagtctcgttgcgttccgtggaatcttccgagtctatgcgctgccggagctccacgacttcaaaacacgtcgagtcggcgatgctaaggctggctgagcgcgcgggtgtgccgcgcaaagttacgatagtagttggaaaatttcaacatagacggagacggttcgaggagtctcagtcgtttggagactgtgcgccggagaacaaccggttcataaaacgagcatgtattaacgaacagagaacgacgattgccgtaatgaaaaactatagtaccagaataaaggatccacggcatgagtttttgtacttgttctcttgctgagagtccgtcaacggcgattctgcttgtcactgcgttaggcatctgagcaactctgtcgactctcagatggataagaagtggagatgaagatcaattagttcgcaggatgagtcgaactccgaacgagtcgttcccttcgtgttttgtgaccacgccgcggaaagatccgcccgcagagctgcgggaacacaaaacatgctcgtgtctgtatcatgagagatgaccgggaaagtcggaggaatgtaacgatcaccaatcaagtataaagatccgaatcggaacgaattcttgtccaagtgaactgaaacgactcagttcaccgactccgcgcggagcggggacgtcagttgggatggttctgtccggagtaaccatcggttcggacgcgtgcgatacaattcgaatagagtcgacagttgtgaaacagtcttgagttctcggcagttgagctgagatcgtcagggtttgtcatcctcgtaattcggtcattgaggtcgagctcgaagcgctgtgacaacggttcatcctttcatccacggagggcgaagtcaaacatcgccttcactgggggctccgtcgtcaccaacggggcccccatcatctgtcgcatcgttatcgtgacttctacgtctagcagctccctgggtttctgctagaattcgagcctcctgtattgcgagttggcccgattctaagatctccgaaactgctagatcttgaggccctcctgttccttgtctatgaacatgaaccgtctcgtggctgccctccgattccgggtgaggtaatgccggtcgtcccggtgagccaccgccggcttgacgacgtaggaactcctccaacgagtgatcgattttcgttattttctgattgatccgccccagctccatcttgagatcgatgcgcatatccacgaggttggcgagaacctggaacgagcgatagttgctgtcctggtcaacatcccgggacccgctgccgggtcccggagtcacgatccccggggaagtttcatccagcttacctgttgataatccgcgtgtggcgcaacctgttggcccgacgaaggcgcagccatgatcgccggaaccttggcggctccagcgctttggtcggagctgaggctgacttctccagctgattcttcaatagtttcgtggcgggaactggccatggtcttgcctgttgatcacggtgcgttagttctccgaagttccgccctcccaacgacagcgagaaagccttccagaagagaaacataccccatttggaaaatcgcgtagctgcttgaccaggcgtttggctgccacctcctccggtggaaacttttgaggagcctttgctagacgttgtgtctgcgccttcctgcaaatcaacgatgccgatggtttgagttctgaacgaatgtcctctcagacgtcacctgatttagtgctcggactgaaagggggacgcttggaagctcagaaacaaactgcctgaccacatgggtcatggccccaaagggtcaacgaattcggaacaacggccggagtcttattcagagacacggttgttgccaaggtgccgatttcagtcgatttcgaagtttctcgtgggagccgtattgcgtctaaatggttcagttcggcctcgagtccattgagagttccgcaatattggaaccgtttctcccctccaatggatccaagaagaatggactctgttctaattgtggaaagtaatggttgcatcccctcaatagcatctgagcgccaaccgctcaacatcgaccagctatgtcggatcgaggtctgcaaacgatctaccgaggtgaaacttgggctcagatagacattgattccgaatgctatctgccgccaacggccgcgtcgatttctagcgacattcagcaactaccgaagagtaccaacaaaagcttgcgccccgtttcagtacgaccgaacagttatgctacttcgactgctccccctggcatgacttaccttttcgccaacgtccggtgcgcatgtaacggagctggtcgtggtggctgtagtcgtcgttgtggttggaggagtagcggcggcagttgttgtgccggtgttttcttttgaatcggaacggagagtggcccatctggacagctttgggcccgccgaggggtgcaatgcgctaggagccgagggctcacttacgttgattgacacgttgcggggtagcgggacatggggcgcgtgcgaggcagggtggccagggtgtacggggttagaagcgggtgtttctccgccagctggaaacgatgccgtcatgttgcctttctcaaggtcaatcgaaggcggtctgtgctgctggtccacggttgaggctggaattttcgtcgaaattcgttcaattcagctcaagtgtgctactcgattgaacggtgcgcaagagggaacaacagagaccgatgtaacaaaggcagtcgggacgaggggaagttaatgaaagcggtttccaaacctttgcggaactttgagaagatctttcgaacgagatggtcttgactcaattcttgcagaggctcgtttttgcgtctttctgcaagttctttttcccgtttgacgtcagacacttttctgaatatcaaccgatgtcttaggttgtatgtaagaagaagattccgggcgaacgaatttgcgaatgcatggtagaaatttagaacttcgaggagcttgtccctcttgattgagtgaagatcgcaataagtgagagctcggacgttggcgcagctctgaccgatggttggttcgcgccagaagcagtcaccgaacacgtcgccctttcctgggaagcagtagaagacatcgaatcaataccgcgagcgttccgccgctcaaaacgccacctcctcgttcgagttggagggagggggagctcacctaaaattgcgacgacctcttcatcttggatgacttccaggcttcccgatacgacgaacgacagggtgtctatcgattctcccgtgtggtagaggagatcgcccggcgctgaatgatccattgagaagtacatcgccagggctcgaagacaaccgtccgaggcaagccggaacgccgggtgttcgttgaagacctgcgacagaatggccatggttttccggagagatcggtaagggcagctttcaaacatcgcggttttggaaactagacgagctacctttcggtttaggtgtacacagatatcagccgtcatgtctttgggacagtagcctaaaacttttttggtgtcgatgcccctggacattgtccacgtggagacgacgtaatccatgacgcgctcactgagtgccttgggaacttcgtgtaacttcatgaactccctaacgttgttcagcatctcnnnnnnnnnnnnnnnnnnnnnnnnnnnnnnnnnnnnnnnnnnnnnnnnnnnnnnnnnnnnnnnnnnnnnnngaacacctggaacacagccggaattctttagtgttcgtcgactttcccgacgtaatcagtggccctgggtccgtgctctctgatgcctccggccccaatgacgctgaatacactcaaccacggtctcattgtcgacctcgtctccgagtcacttaccttttcattgtcggtctccgcggcgacgttgccgaagccaacagaagtcatacaggtcattgtgtagtagagggacgtgacgtacatggtgccccttgcaggaccccccctcagttcagccttcccgttttcatagaaaaatcggaattcttctcttgttgtgtttgccaacttccagagccaactgaaggtatatccattttcagcatcgctgcgtccgatcgagtacctgggcggaacgggatcgtgagctcaaccgttcccaggccgccggccggcgttctcatttccaagaacgttctggcggttatacgtggccgatcttccgtatccgtagcgggagtctcaatggactcgttagcatattcgattgcgtcgactcattctactcggtgtacaatcaatagtggtcaacttaccaaatgcaagcgagccaatgcgcgacaagcatatagaaacatagcagcaagattaacatcgcagcaccgtattctaaatatcgatccagcttacggacaacccgtcccaatcggaggagtcgaacgactttcaatgcgctgaacaaactcccgatgccttgttgctgaaatcaattcgatcgaattcagcatatcctgttcgaagcccacatctccaagcgttaccgtatgtttgataacgacgagagcagagattcgagagacgcgcttcagagatcacgagtgttcgaatagaaacggtcggagttatttctaccgagaaagactctcgtcgctcttagcaagttgtggattcgtccgagaggttcgattctccaagggtattggttatcaagatcaggactccacactaagtgtatcgacattcgcgctcgaggccggggacagatgctctgatgccccggaagagaaggcattccccacttcagattttttcttctcataaattgaacgaacgcgcagaatcgaggtttctgacgaggcccgtttcctccggcactgctcattctcaggaaagcagtcaggaatgggaatcacgggttcatcatatccgttatatttcctcttccctagaagagaggagacagatgatgatcccaaatggatcagaacattcgcgatctccctcgatcactggttgcttatcatctgaggtccagctgttctgtcaccaaaattccccacccaatcttcaatatctctgccattaccccctcgtcagtgcgatcgtagtccagtcgcaatgttcgtcaggcatgaacacgtcacggtgagacgtgtgccagatatcttccccgtcttccgattccatctgtttgaagctggagccatctcgtgattgtcatggcactgctgggtgagagaatcatcgagatgcagaagagtcatggagaagcagaggagcgacacagggaaacagatggagccgaaaagccttgtttcagataaacctgcttgtaagcagtcacgcggacatatggcgtcctctcgggagagagtcgattctcggagtgtccagctttaacggtcgttcgatgaccttgcacgtgaattcgaggaccaaatcgaaatgtcggctcatcgacattcttcttcgctttgttttcgacccgagtgtccgacagttgaggcagcgacaacagaatcgtggctcgaggaatgttcccccggagcttgacagttatgcgcgcatacgtacatcttcacttccgtcgaaggcgttgaaaacatcgtaaggtaaacaggatagtaggtcgatggtgaaccaacttttcaggtaattcattcgtatgattttcgggtccgagacgacctcgccgccgggacctgcagacaatgggaagacgatcagccatccgtcggcagtttggtatacgagccacataatataaaacaacacttgatgccgtaagttcttgcgtcatacggctcgctgaccaaggattgctcgtttattttgctagttgcgttcgagcgctcggatcaacggaaacttgctactggagagacagtttcagagcttttccccaagatatcttctgttcacgaaaaaaaagtcagcctggaacggcccggttgcattatctaggaggcaaagcatagattttatcctagtagagaattattcgctcacccacgaacgttgtgtgaaagttgagaacaatatcgatgaagaatatcacatcaacgatcgagtccaaaacgagcaaggagacgtcgtcggacgttttgtttttgaatgccacattgtacggcaccattattgcagtgtagaacgttaaacagaggattatccaatcccatattgcctggaaatgaagaacggtgataattatgatcgaagcaaccttgatgctccgtttgaagttttcggatttctcagctcttttttccaacccatcccacggaacagggatgcattcaacgaactactgtctccggcatgccggggacatctttgattcggtgggtcgacctcgagatcagagaagtcgattccatgagccgtgactgcagctggagctgttctgggcggaagctaagtgattctttcaggaaacgactcggaatggttcccggatttgtgcattcgggtttctggttgatcgctggagagaatggagagttgaatgattgaaaactgttacagtcgtcggactgctggctctaacggttccagctcgggagataaacgacacatgcctgtgtctaatgcttgagggagacgccctcgtctccttgtaaatattccgccggctcgccgggagcctgactccgtcgagtagcgttgtcagataatactatctatccttcgcctgggtggaaccgaccaccgcttttctgactcgggcaacgggtttcccgcccaacttgcgctgaaagagcgactctgacgagacggatggaaagtctctcgatctctctacgcggaagtgacgtctcagccattttctcgtggcgacatccgcaagtgattcggtcgaaatgctttgagacttttcagcaatgtacaaaatgaggattgaacctgttcgcgcccctcgttatcgtgccgttatcgagcgggaatcgcgctaatgatattatgttgctgtcgctgttgtcgcggtggatgtcaccgataggaaaacgaatttatggctaccgttggttataaagcatctttacgtcatgagccctgagccaaaacggtgagttcggcttccgtgaaatcacgcgcaccatcggacgcgagtgcttagacgagacacgctagatccggcagaaaccgaaaccgagtatggcatagaaaacaaggtggcggtgtgtcgtcgtgtcttctcatcgttgtcgttcagacagatgaaggctctggtaggtaactcaccttgaaggcacaatagtgaagcagaatatgaggaggtgttttcggagcttcttgtcggtattgtggaagtacctcagcatttaagctcatcatgtgcgctatctgggactgtttagagctgtgttcacttttaacagccaccggcaagtgagatgagaattgcaccagaaccgacctgcggagaattattttaaattttaatctgagcaaagtctggctaataacttgttggtcgcggggatgtcggcgcatgctgcttgaggagaactcaaaccccgagagagtgtaaaagttccaaacgcggaacatctttcgctggaggcccgtgaaaggacgacctctaaagccagtgaggcttcagatttccaaatgagacttcttcactcacgaaggagatgtcttagcattacatggcggttcgagtcttgaatttcctttacgctttctctcatacgacgaatgccgcagtccaccgatacttcaatttgcgatcccctctcaagtagaaagacggagggtcaagattgtagacgttacagacggcgcccctgagttcattagcacgctaatttcattttgagccactaaactcagggaactcattcaggaaacttcgtttcgatcggcctctttccgcagcttagggagctcttcgacgacaagctcacgaaagcaggctttggatgcgattcgtatttatcttcttgctcggtaggtgaacgcagcgcaatcagacgggctgagcaaacgtggaggacctcgatcctgaacgaaaatactgggacaaataatcgtttttgctgcaatcgacgatgtagaggtaaaatagaccaaatttccatcgagtttattctactcaaaagcaaccggctcgatccatctcgaagcatggagtggttcgaatatttcgcgcttgtgttactgctgcggatacacctggctgctcgagctccagacgatgggaatagcctctgagatgtcttgccaggctaatgaatgatacacaactgttccggccggcagcgaggtcacaataagactcggagtgcgcgaacaagcgtgacagtttcgcagcggattgagcaacttgggggaaattgcgacagctgttgaacgaagtcgacgttctgggacgggccgactctgtggcatccacaacttcaaccgaacgagtttcgagacggcagcatccagtagcgccgacttgtttatactgccatgtgtcgaacacgcctttgattcggacgaagtaggtcgtaataccctgaaggacatgtcaaggtattaacgccattggcggccgcttcatccgcactccgaacacagcgacgacaggatcgagaagagagtcaccctaatagtaattgctttcgctcaacccactttgcgagatacatttgttctttcccttcgttgggaaggagtcagacaaattcaatcgacgaaggagccattggcgggagtgaaggtctctcgaaaggcgagagcaacagcctcgaactcgctcagcctgagcgaaattcggcgatttgatatacgtatttccaaagccgagagggggaaagggcggcgacaacgaagaatggctcggctctgatcatctatgagagggatgttttctccactcgcagcggcgctttatccagctgaatctcagagccgaccgtcgacagagtttgacacgagatctgacacctctgtcaatgacaaatcgccaacggaatctttccaaggacaggcgagcggatttgctgaacattcaagtctcgacaaacgcgagtgcccttcgttttccggtcttcgtgatcgaagttcgacaccagtggagcatcgatgtggacgcgagtccggttcgaatggtcgagattgagatacgcggtcgagggtcaagactcgactttcgcgactcacgcgaacgtgccacacgcgagtttccctcctgccccgcaatgcttcggtcacacgaaactacgctccgactaatcgacccgatgaggcactcagaggaatcgggctcctggtatggaatcgtcactcgcgaaatcaagcttccgtactgcggccaggggagcggagagagctcgcagcagtaatctggttatttccagcattctccattcatcggggacctttcggaacgattggagcgatttctatccctaaacgaatcaaactcgacccgcggccatttcggtggctcgaatccaacgcgacatcgtcctgagaagcggtggactggagctcggttcgctcgtgagagctgagagaattgccagttcggtcatgaccgagaaaggaatgacctttcggtgaattcgtcggctccccgcgggccacggagcgaagaggccgagagagagagagagagagagagagtcgcccggagactccgatcgaaagacatggagggagagtcagtcagtcagtcaatcgcacagccgtcaaagccggagaacaagtccataattgaaaagcgggaaggaattggacgaaagcttttgttgatacaggccggagcttggctcgaggcatttcctgatctggtagttctccgcctcgcaacagttctcggctgtccggtccgctctcgttcggcacgcaggaatcacgcggcgatccgtcgctatgatctccaagctcatggatcccgtgattcgcattgacatcgacgacagggaaccctaactctcctcggcagcgcggcgagtcaactcgatgcatcggctttagatagtttttccctcgatggacgcggcagccctccgcggccctttctctctcgccttccgcggccgtcgtctactccttacactccgttctcatataaagatcgttgtcgcagtgcgatcaaacgacgaaatttattgctctggcgccaacatcgcattattcatccacggatcgatgcccccgaggagaacaatcgtcaataaatacagtttcgatcctgaggggaccaaactaaatactgcacttgatcaccgccgacgccaacgagaccgcgaggggtgcaaacaatgaaaacatgtcacctgctgatgtcgcctttctttacgagaagctggctcgcgacaggggagaaacagaagaaaatgagcccgacttccggggatatgagatgggaatcgccggtctcgcgagtcggatctgcgctggcctgcttattccgcccagccaactgggtttgttgtgagcaggaaacggagtccaggttttcgactatattttttgcgccgtgttgacactgcgcagccgaggcgtgctgtttgttcggatgagaacaacaaacggccagcgcaggaacccggtgacaggaacgttggtggggggaagtcttaacgcccggcgagagcgctgaccttgctctgcggcgtcacacgccagctaatgaggactggcttaatctggtgttataatgaactttttcaaccctctcattactatacacacactcctccgtcgctgtcgccaccgccgtctccgttgtcaacgtcgtggccggcaccgcctccagggaatccggtccacctagcttgtcgtcgcgaggcatatttccctccaacacgagacgctctcacatattctcactgatacaggggaatccatctccggagatgattgtaattacccgatccttttctctccatcaagcgagctctgctggacctggagtgctttcaagtctgcgccgtttccgagaggatatcgcacagagccggagaggaattaggaggagaaaaattggctcgtcggtttgattgatgttttcattgtagaagtgcggttcgacggcgaaggcggatgatctgtgcacttttccaccgctcgatgttttcctctcgctgtagctctcttcctggaggcgctcttttgatgccaaccaacggtcgacggcgatcggtggcttgcggttggcgcaaaaaccaatatcgaagttattaaataactgagctaaagcctgtctttgttcccctgtccgtcggaaggagtccctttctaatcaaagagcggcgcccgggggagaccatttgaattattgcgatcgactgatgcgaacctattaatagatttcgtcagcctgtaccgccgatttcccgatagctcgaacgtgtcgtaagcttgccgcatcggagggctacgttcgtggattcgtcggggcgaggccggagaactcggatctttcagtgctctacatccagcttgagcatgtaatctcaggtgtggggaccgttccttccgcggagcttcttggtcgagtgagctaccttcacttcagagaagaaaacgcaacttaccgacttctggtaacggatcgggccagacgggcgaatttggacaagcccgccttagcggcgtcgtcatccagaggttgtttcagagcggtgatatctcgaaatgtcaggaggaacagaacgacgagatccttttcgtttttgatgggggccacgtgtaagagtagccatagtggtgtccggttccgtttgtagagtaggatctccacctgcaaggtagattattgttgacaaagcgaactttctctcactgttcattttctctgtctcagctttttcgtccgttgatcttctcccagtcttctcgctcagtcgtcgatgtcaaacgagcatttgcgaatgagcggcgcgattcgccattcgttcgacgtgatattccgtgtgcggtcaatctgcacgatgacaacaaggaagtcgtcccgctgtagaatcccgccgttgtaaagaaacacaagacctctcacagcagctccctccgttcgttccgggaacatcttggacggcttggtcacaagaaacgaggcgcggcagcgaatctcagctctgaagcggaatctcctttggaagttcaaacgttatcttcttcgacggcagccccgttttctcgactcatttctgtactgatgtcctccagcgcggcactccctcttaggttatacacataggcatcttcatcaggtgtttgcagtgaaactcattctgaacgtgttccagagcgacaatgacaagcggcaagcttaacgatgcctcgttccgagatggaacgtccccgcagtgatccatttccatctgaattcccggatagagcgactctcgcgagctcagccccttcaaaaacaaggactcggcactgattcaatgttcccgttgacggcagcccgccatcacgggcgaagatgccactttcaagtcactccaggctcatcaaggcgagctatcgctcacgctctgccgcgcggagatccccagcggttattgacgcaaacccacgccaaccgtacacatcacaggtagagtgcatcaactgtttgattagcttcgaatatcaaagctccaacccttcacgctttgaaaggtcagaactgtgggtcttggctttcgttagcgaacagccacggctctgtattcgattctgagattgttcctcgagccacgaaccgagtgctctcgatgtgcggtttcgacgtccagcagctccaaagacgagccggtccccctccaaccgatgaaattgtacgtcagcctctgtggggcagactcttgtttggaaattgcggagtcactttcagcgtacacgtctggcgatgtacatgaggaacgtatcaaataggaggttcccgttactcttgacggcagcacgaacgccatcgacttgttcgtagcactcgggatgggaccggaattcgaacgactgtttgaatgagtttcgctcctctctgtccgttcggaatcttcgactttcgtttcaaaatctcggcctaccccgagtcgcacgcaccgttgaattcgtcatccactctgcaagtagcgccgatgatctccagtttcgtggttcctgttatcttctgattccgttcccgaggatcgcacgccctctctcgccttggagctcctttaccgatgagtacaaaaatcctatttttcccgcgaagatcagcttccattgtgagctcgagcgatacaacggcccggcacgaacggcaccaagggaggagagagcgaggaacagaaatgactcggcccgacttccaggaggtctcgtgtaaattataaaccagcgacgactacaccaaggccgttgggtcgaatcgacacaactggcgcggctgagtgagcgagtgcgtctccccgcttcagcgtggtctgctgggtggtctgctggccaaaggtcgtggccgaactttccactgagctcttttgagagacgcaaaaacttcgttttttgtcagaatctcacgttcggcttctatgtcgagatgggggtgctcatctactccgacctcttatctccggacctggaatcgcttcgattgagtattcctcgagttcgtttcaatccgtttggtctccagcgagcatccagccgcgttgtggtcgagtggtatatatatgtcagcagtgacagtagccgagctggatcggttcgaatcgatcgggcggaatgctcgaggtggaaagttttcgacttccggtgcgttagcagttaattttgcctttccaatctgttccgcctgtcgtcgtcgtccttttcctctgcgagctcgcgccggggtccgttgtctggcagtgtccgtaagagagcttcccacgtcgctccgttcccatgagctgaaactgacgcgcgttccgatcggagcctcgtatcgactccctgcgacagggaagtagtgtcggtcgcttgcgacaatctaccgctaatggtctgactttcccgactcagtttcatctctagctcgaccgaatgtcgttccggaatagaccgttcaggcgggttggagccatggaggttagccagaaaagggttctcatcctttggcacgtgtggttaaaatggttctcgaacaggaagtcacgtagatgggcatgttgaacaaaagccccgagacgagattccgaaatgccgttccgggatccgggagccgtgtcagccctctgaaggagcttgttcgcgaaagctcgtggaacttcgagcggctactcgccctaatgaacgaacgaacggacgaagaaagaacccagagcgcctctaatcaatcatttagaaacgcgagtggaaaattcgagtcctaccgactttgagaaccaccaacacgacgtggggccaccggggagcgtgtctccgacaccactcatatatgccggtgccagagtggcgcggaacgtcgcgacgtgcataagaaccaccataaaaatggagagtttcttcctggctcctcagctttcccgtatcggcgagactgacgagcggcaccaacatgagtggccgttgaggtggaaaaactgaaacacttcacaacaagcccggagcgaaattcaattacactcatcaaacaactgtcggggagaaggagaactgtcgcggcctcgctatcgagaaaatgacagcggccgaggaaaaacggaaagagtcggcctgatccgagtctcgaggatcgctattcttcccctcaaattcacgaacatctcctcaattctcgcagcgagggcatcaacaaacccgcctcgttgctccgcgggacgccactttattccattccttcgtctctcgaaaagttcgcgaacaatattctgtctgacatcgacagcgtagacttacctgttcggattggtggttttccagacactggtcgaccttctggattgtttgacgatcagtcaattcgccatacatgaaggcgcatcggcaagatttttgcatgacttcggctcgattgtagcccgatattttgcagaatgattccgagcagtagactatgggatagtctacgatttgagcgttggcgagaaggannnnnnnnnnnnnnnnnnnnnnnnnnnnnnnnnnnnnnnnnnnnnnnnnnnnnnnnnnntccgccatctccctccctcagtgggctgcagcgcggaagaggtctgggaaagttggcggaattcgagttgtcaaatttctctccgatcactgtgaaatgtccaggaagccgactctggtcgaggtcgcgaatgattgaaagagcctggcgagaccgcgggattccaggctgtagccggaagacctctgcatagtcaaattctcgacatccaggacgcgaagtgtcggcaagggacctgcgaaaaggtccgcggcgagagctcacgctcggtgaatcgacccaggccagctgacgcgctcagctgaataaaaactgtgcaaactcccaagaaaccacaactgcgctacagaacgactccgttgtcgtacagtgcgtttctgtgctgaaggcagctggcagcaatatgtagtcgcatggcgattaagagtgcggtcagctgtgcaaagcaactgcaatataagggcctatgcgtttccgctcgagcaagctggaacaactggacgggagttgtaataaaataaattgccatctcccgcccttgctcggccccggagctttctcctctctcggcgaacaatcagcaacaacacacggaattagcgccgccaaacgctctctcctgagttcccggtgtggaccccccccgcacttcatcaactacgggcgagcagggagcggtaccgcgtcctcgatacctggaatgaacacttctcagccacctgctcattggacacacggttcgcttgtagccgaggctcccgcgatgagcacagttgtcgtcgacggctttcgcgattatttccgccggacgagtgtgcctaactgttctcactcctactgagatcgttcgcgtgtcaatttgtttctgaaggcctcgaacttcaagaatcgcagcggctcactgcaggtggacagttcagttttcattcgattccatggttaccgttctttccgggagcgcgcgttgaaagcgagtgtggggggagacccgagaggcgtagccattgcgcacacgccacagttcggtgaggactacggtaggggtcagcgtgggcggtatagcgataagtcgacggagcgatctctttgagcttcctcaaggcgctcaacataaaccaaggccgttgcccagtcggattgccgtggtcccgaacatttgtaattactgggattccgacgcaaagtgctccctccacgctgagaaaagttctcctcactactcggtctccaagatcagagttcgtccgagcagttttgtggggagccatttatatttgcgggtgcgcggttggaatggcgcccgaatttttcgcgtcatgcagagtaattcaacggagggataacctcgcgcttctgtctcatcgagctctcttccgtttctgtgtggtggaccggagcgagaaacagacatccgctccacgagaagatcattcatgcactcgcagtaagaataacgacagcgaaaggtcatcacgatactattaggctgcgaggacgatcaaaaatgtttcggcgaacagctgcagcggatccgcccgggttgcgacgagctcatcacaccttgatcatcaacagcgatgatcgtgccgttcgggccagggtttgcatcagtaaggataaatcagcgatttccaaacgcggcggatcccaaggcgagcggtcggagcgtcggaatctctcgagcgatttcgaggcggtcactccgtatgttcctcgaactatgtgcgcgcgtttgggaaaatattcccgaaatatcgaagcatcgagggagcctctagaatgaaaagggcaataggtgaaaatggaagatcgaaatgaatccaatccgaacccgattcggaacttcacaactcatgcgtccttcccatcgaagtttccttattcggaagccaaccagaggccatcctaaggttcgcaatgatggtgacgtcgacggtaaatgcaagccgtgacaaaacgcgcccggagcaagcaagacgaacgaggacggagacgccgagccagcaaaatctagaagaactccgaaagatgaattgttccgatttccgtcgtctgttctcgccctggaacctcctgcgaggtatcggctcaaaccgaaagtaaaatctctgagccttatcggaatatctgcgacgggatccaccgcactgagacggaactctgtggccagagcgactgttccgccaatgtcgttcagcgcgattcccacactcacacttcaaaccccaagagaaccaaccgtcgccgcggtaaagtaagccaaggcagttcctggagccatcaaatagcacgtgttttgagccgacgattcgttttggagcgacgtcgtcctcaaatatcggaaattctcgagttgcgcccgaaccgcgcgctccgctgatccgcttctgtcggacgccagatactcaaaccatgacaatgctgatgccaacagctggtgtcggagccgcaggtgggcgcgacgcccatgaatcggtccattgttgccgccccgtgtcgtccgacgagtttcgctctgcggctcgggctctgcgttgctccgagctccgggttctgtgtctctgacgggtccacatccgcagttgctccctgctagatcgagcagaactcgcaacggcgtgccggagtcaaaccgttaacggcggctcgattttagagctacgtgcttgacattcagaacgttccactgttgcctctgtcagcaatggggtcgaggcggaatgcgctccgcgccatcttgtccggctcgtcacgggctgcttcgatcattttccgcgcggaagtcgtcagacctcacctgaagcgagcgaaactgaatccgaattgaaagtgcctcctcaatggaacgagaaagcgggaaatacgtacggaaagacgctggcggagggccacgcagcctgctgaagcccgactttctcgatgacgagacggaggatatattcgtagtcggggacgaggtatgcagagaatactaataacacggcggcgagacagcgaagccttgttcccgtgtagaacaagtattagttgcgtacatcccagatgtgttcccttcgagtggaatcttgcgcaaaacgcgatattgccaggtgaaccagcgatatgatcgcggaacgatgagttcttgcatcacgagcagaggatgggtttgctcaatcggttatgatatcccgctcgctagatggtgctccaacagagcgcccagatactacaggacggtgcgcccgatccttcggggatatcttcttccagggaggctccattttcccttcctcgtccctcgacaaaccaaactctggaagcgtccttcgagacgccggcggattcctgagacgagctccgtcccgggaagcgtccgggaaactcccgcagctcccgccgagccctgagatgctcccgctggtccgacggtctcagctgggcaatgctggagagaccagcaattggaaacgtccggagcggagcgtcgtttgacacgaggagcgaatcctgcgtttcaaactttgcgacatccttctgtcggatctcgtcgtgctccattggttcttcccgatttcaagtccattgattttcgcgaatagcagcctctctgccaatccgtatgctccttcgcttggccgagtaggagcgccgtgtttgacaaggtcgttccaatgacggatcaagtatatcgtcgggcacattacggacgaggaggggggggggggggctgcacggagcgactgttcgtccaaagcacatcgctctggatattcatctgcttggagcctgtttatgacnnnnnnnnnnnnnnnnnnnnnnnnnnnnnnnnngccgccaagggaaatttcgactcgggaaggcccggtgaaccgcctggcttggaaagtcggctccaggagttggcggtggcgtggatcttctgagggaatatgcacgccgcgttcaccctccgccactcggaagtgccgacgatccgttttcctattatttctttccctgaactccgctcagaagttctgacttctccagaataaagtggtctttgcgaatgctggacacaccgccgaatattgaccggcaacggccaaggccggctgtaaatcgtgcagccggcagacttcgtggagacgttggggcgtgcgcgtgtgtgagcgagcaaagcgagtcgcagcggagggctctgaatcgttgttatctccgtctttttgccgagctgctgcttttcgacgctgccgtcgacatttccacctgatcgaaaagctctttctaatgagagctcgtgttttcctgtttgtttgcttccgacttccggctcccacgggttcacaggatacgcttcccaggggaccgttcgtgccgctcgagccgcaacagccgtagagtcggagtcctgaggcggcgacgacttcctgcaggaacccgcccgaacaagtcctcgaggaaaggtcgttgcagcttgaaatttgaatgaaaaccacgttccgactctcctccatagttttctgttcaccgtgcggcgaattgtgagtgtttgccgaagcgaggcccagtcgaagaatattttcgaaacaatgatctcgctccacaggaggaatgtacgtgaaaaatcgtccgagggagacagaaggaacacgccgggggaggtcgacgactacgttggccgaggccgctcgagatcccgaattcatcgaatcgcagactggaaatccaacgtgagaatgggttcattctcattcatctggaagaacgcagttcgttgccttcttcccctacgtagtcagaatctcgccggcaggcttctgtgtcccgtttggatcaaaacccagacatctggaccttcaggtcaaggagcgatcgccttcgttatctttgtgagatgatcgcctcctagcgaatcggatcgactcaagtggaagagtcaatacatcacgaggagacctcatcggggaggacaaatctgaaatactctttttctcgcttctcgagaggctctttccgggagaagtcatgactattgttagcggattctcgatagcccagcgcgcggatgttgtcgaatcctcccggaagcctcgactcattccgcgagcttgctcatatatcgaacggcgccctccacaccaccgcaaccgccgctctcgatatgtgacgattcccacggctggcatgctcgcgaggaattcgttcgattctctctctgttcttgagtcggctctgtttggagaatccagactatttgtcttatttcctcttgtttcatccgcggcacgggcgccgactcgcttcttcaaacaggagctctcgagaagagaacactttcgtgcgtctgctccacctaggcgttgcaaaacatgccatgcggctccgtatcagcgaccgaggctagcgagcagaaccctcgaacaggttccgcgcgatggtcggcggaatccaagtcggcgggaattacggcgcatccactttcacgatgagcttcggcggatcgaacgaacaccatgcgcggggttgggcatccgggatgcgaacagggcccgcatttgctgaatgacggataattatgtggtgaattggatcccagtcgatttcgcacatcagtagacgccgccaactccgcgtggacagatccgtcgacaatacacctgaacgagtcgcaggtattgcggagggaggcaacaatcggaattccccgcggtactcctccacgcagcgttgtggcatcagattgaaagagattcagagcaatgcgactcgccgtgccgatcgcgatccttggggctgttgctcgcttcaaaagcatcggaacgcgagtcggctcgatgataaaactatttcctctcccgcctgtcccccagggacctggagcgactcgtgaccggttgagcactatcgaggattcccgttctctcgctttccagaggcggatcatcaacatacaatcgggcaagttggatctcgtggggctgttgcaaaacacgcatgctctcacgaagacacacaggacccctttccctggtccctctcgaacgtcaacagcgagccgcacatgggagatagttgttcgagcgccagacacgagcacagagtccggtgggttctgttctcaggacgattccgatgtcgagtcctcatctcgacagcgttgtcacctacccttccagaacgaattggttccgacaacagttcgggatccatcaatgcaaacgagggagccggcgggagaatcttgtgcagccagctgtggcggtccgcactcgatgacggcgacccttctcgccctttcggactcggctggagcctgtggttattctcaccgcaatcagcatcccagaaaaaaaagagaatagagaaccgtccggtcccctggccacgctccgattcgatagctctggatgccgcggctcccgatgtctcccatcgatcaattcgagctccctcgtcgttcctccttcctcacttcgttgtcctcccactccttgtccgctgcaattgatccaccgccccgaacgctcacagctatagctccttccgcactgtttatggcgtcgccggagagagttatgatcaccagccgacgttgataccaatttaggactcggtcagtcgacgttccgacccgcaggggagtacagccgtttttgcgtggacacgtggcaggttctagttcgcttcgccgttggaagtccgccaccaggatgcgggagtcccctgccagtaaaaatgcgggttccgcccgccagttcattccctccgcgaggagtttcctacgcgggagtaatgggcgtcttcgtctgggacgcgggaattcggaggcgacacatgttcgtggtttacgacgccggagcggattggcttctttcatctcaactcgaaagtccacgacgacggcgcgccatctctcatcagctcaaactcggccgccccgacggccgccctctacagcgcgtgtccgcgcaggcggcgcgttttccgttccgctcagccggttcgtctgaggacggcctagcaaggggatcctgcgactcccgtaagaagtctccgcgttatgcggcttgtggaggagtcgcgttcgagtgttccgcgcggcgggattactgactgcgagccgagttacgcgaacgagccctgctcgaatcgtgacgaattcgagcctgtcaccaaattttcgctgacgatcctttccctcgactccgtgctctcgagctgccagctcgcgcgagtcggaacgaacgacgagaagcccgagacgacgagacagggactctggactaaagtgccgagtttagcttcgaagcacgccgtcgacgagcgcgttactgctgatcgcgttcggtgtcaaatcaagttcccggtacgggaaaaccgaccgtgccgtcgcatgattcccaaagacaacgggagagggatctttcggtgggaggctctcgacggaagaaacaggtagcaccggaaattctccgcggagttcgagcgagtcgaggactgagcggcgggctctgccgttcgacccgaatccaacccagacagcagcacgtcagaggccggccctcgaaaacttctccgaggcgtggaaccacaggcgaagctccgagacgcgctgtggctcgcctccggccacgactcccgctccgacttctctctcgaggttctggaagatgcgcaggagtgggatcacatttgatagaggagcgtcgagtcggtggctcggtccaaacgaggggggctctggaccaacggctcgaaacactcggggagatcgcacttgacgcatcgataacctttgtcgttgcacgatgcgaaaaaaaaaaaaaaannnnnnnnnnnnnnnnnnnnnnnnnnnnnnnnnnnnnnnnnnnnnnnnnnnnnnnntcgacccgattctcagcgaatattgtcacagaacgacaattgaagagagggatgaaataaaccgctggagggtcgttgccgggtagcagcgaactgttttcctgtcgattccctaccgctgttcgttttgaatagcatctcctcccctgggaaagtttcccggtgattgtgcgccagagcaggtgatcgttgaaattgcgcccggaaagtaaagcgccaggaggtatgccagcaattgccatcgtcgctttccgtctcgaacgtttccgcccagataagagttgctcgtgagggggagcagagagaacaagtccgtcttcgcccgccgttccccttccggccaatgttctgctcggaccggttgcgctcgggaaccggttcgcgtgccgggcgaacgcagcatttgactcgccttgagcgacgaatgacccaagtcggcactccattaggcggccgtggctttttcgccaactcggcgctcgtgtgacctgcaagtcgaaaagccacggcgaactctgataatttatgagccttcctcgaatcagattgaaattaatgaacaggcccactgaaggcagcactgcagacgccacgacggaggtgttccgctccgccagacgtttgggcagcggtcatcgcaacccatctcttcgagcgctcgatcggagctcagagacggttccctcgtccacgcaagaggcaactctctcagctcggaaacgttccgaacagctgcccgggagcgagaatctgattgcgtggagattcgggaactaggccgtttcacggctcgccgccgctcgtgattgcgaacatggccggagtggacatcaccaatcagaaccgcacagtctggatcagcgttttcttcgcaggtgatgattgagctccgcgaattggagctcggcaaacctcgcgacctcgttcgggctcgttcgctacatcggctcggacaatgtgaactcggaacttcggccagctagctcgtcggcgccgctcgtacaaaccccccgacctggatcaccgcgagcagcagtctcggagcaggaaggttcaactcctgatttccgcgcctggactcagaaacctcacttcatgcaaagcttgtatacggcaaatacggacgaacatcggcggcaaaacggttcctccggcctcgagcttcagggtctctggtttttcgtacacactcgccgctatctaggcttggagtgtcttgattgtttctgcgggatgtctgcgggagacgtccgctggattctcaccattcgctcgttctgccggatcccgcttgaagggagtctgcactctggtatctttgccggtcgtttgcctcgccgccgccgccgcctgctttgggcctcccgttatcctttcgcgacctcgagtagcaacgtccatgttcacggaccaaggtttgagtcatcatgcagtcagccatcgaaccctgaatggccccgcggagtctcctcggggacgttggtctcactgccagtctgccgccaccgctgccgtcgtctgcgccacagcggggccaggcggtggcggcgacagtccctgtttgagagtcccgagacacacaacacggggcgggggttgaggacggaaactctgctcgtccttaattgaggagcagttgcgatcaatctgcggtcgttgacgttgccgagcgtatcgagtggctgcagacaacggtatcggatgctcacatattcttctctgatcgccttcgggatcacgggtccgaagaattcggtgaaacgtgatttcctgagcttcgaagttggggcatcaatcgttctacggctcccatccatccaggtggatgcgtgagccccgattctccgactccagtgactccatcaacggatagagataatgggttatgctctaatttgcaggacaaccgaaccggggcttcggaatcgaactcgagcccgaaaagaactcaagcagacctcaacgacgattgcgtttgattctcgtcgttgagctcgaagacagcattccccgatcggcagtgggcaagaagggactcgagggccctcaacaagaaagaacgggagaggtgacctttcggtatgtgacatcgaacggagagacgctgttgggaatattcgattgtgtttctggaggttttgtgtattcgaggctttatcgcacttgctccgccagaacgttggcgatcgaaatatgcaggtggccaggtcgagggtgggcgcaacgggaggtcctgagagccctgaagtggtccgaaagctttgatatcattctctcccgtctccctttgtttgctctccattttaagctgattcgctcaccggattgaatgatcctcccgagcgcagcgacgaagaacccggaagtcagtgtgagccagtcaagtcaacggagctcccatccggatggaacttcaacttatctcggttcccggtgaccttcgttccgatatatctcctcgtaagggtgttaggcgacagagggagggagagagtgcccgctgaccacgacaccggttggatcaggttttgcatttcaggcccccggagaccctcagcggtggtctcaggcgtcctgatcggggaccgaccggaaatttccagtttgaggattttggtcccctagctgccgtccgttctgtcgtttacattgagatgggaacgcgaggggaatcgcctccatctgcgcctctcccaagaggacggagaacgtcactggggaacgagcgtggcgatcgatgtcttgattttgctcaaggagatcagaacaggaaaagcgaaagccgccgctgcatcgggaattctcttttcgactccgcagctccgccgcgaggccgaaactggagtgaattacttttagatttgtccgctccacactggcacgatgactgtcggccgatcgatgcttccggacgttgttatcgacgtcacggttctatttttgagtcgagagtggcttcgaatcgaggccgtcattcaagttgccgcgcccaaactttccgaagcacctgattgctgttggccgactatttcggattcctggtggaatcatcgagcctcctgctcgccggatcgtgggattgaaaccgggcgcgtctctcgaccgctcgtgggggtgcccgtgaggagagtttcctgtcgcccctccaaacaatatgttccgctgacactacggcgcaccggcaggaggaaacggctgcgttgaaccgagtgccctaaatgcggacgtgatcatgtcaaggtccggcttcgactcgacgccgctgtgtacgttttctcctcttttgccccttgccgggacagcgggtccgaacccgtggaatgctcgcccgcggaaccagccgtccttggctcagctgttcgcacgcagtcagtcgtgcttaaaaagccttgcttacaaacagctcgcaacccgctccccgcctcgcttgtccgccgcatgtgtgggcggaggttcttctaacaagctcccctgcggaaagacctcccatgaaaggtatccagccggtcccttggccatcggagcgagcaactcgaaacgctctgcttcgttttacgctctgcgaatcctcggctcttcccccccagtgccgtcattggagccccagcgtgatcgttctttgggatcgagatcctaccgaactgtggggcccgggcgccctaagctctcggtcgacatgtccgtcccagggaggcgccaccgaagtgctgagagatgcattcgggacaggagtgcgtatctgttgctgtcagctcaagtgccaccgtctgcttccgcgtccgattcatggtgcaggcaatggcggaccgggggtttcggcggcggacgaacaatgaatcaatccgcgcaagcctttgtggcgccctcccgccgctgctgccgtcgtcgtcgtcgttgttttcgttgcggtagtcattgttgacgtatttgtggaacaaacttccaacgaactgtttttgatactccccgggtctcccgtggacgactggtcgtgagaaaacccccccgccccccatgtccccctttcggaggcaataaccgcggcagttgcagaagaagccgaggaagtgttgcgcaagttcaccctgccgccgttggtcaggggctctgccggtcttatctcgcggacgaggctccttatctggaacgtgggatccactttccgttctcgttagggaacgggagaaacggcagcagaagaagtcccatagaatcagagagctctcgaaacgataagaatcccattgacagcgtgtccaccctctggagcgagagttaacccggcggacgcatacttcaatgctctgtcccgaattagtttctcccgtcgaactcttcctccttcgttccctgcttgtgagagacgttggcgacagcgctccattcttcgggatccgtgtctctacggagaatgtactgtgattcctgcgcttcttctctgcggaattcgagtcggcctacccacattcgcgccgggaagatgttcgccgcgaatgcgaatttccgtttctgttctcccgttggtacgcgatgctctcatcccattgcacagaatcctctaagctgcgcatccatcgacagcgagctttgtgacgttcccacttgttgcgttccctctatagttcgcaacttccactgaagggttgcgtggctctgccccgccgacttcagccgaccgtggcgcggcgtagaggtttcagcgtgctccgcaaatccctttcgtcaacgaaccgccacgccatttagattcggtggcaagggattaacgctcgcgttatcccaagcttgattatttctgcttggtcggcgtgaggtaagctcttttcgaccaatgggaggggagtttccggagcagatgtggactgcgatagctcctcgcgtcaggtcgtggctgggagcacgcgggggcaggaatcctcggggaagaaatcggaatgtgtgcgatcctctcgccgttgaagtctctgttggggttgatcgttgcgaacaactctcttctcaagtgattagctttttaactgcaccagagtaaacagaagcgccgccgccgctaccgttcggcagtcacgaggtttgggcatttttgtcgacgcaggctctccctcaattaaatgctgagctcatttctgagcgttgtgaacgactttaagtgaacgagcagtcgaagaaacctcgtcctggccgagaatggttccgtcgtgcggtgtaacacggtttctaatcaacaaacctcgagtgaaatgctccggaaaagcctcccgaaaggaaggaacaatgaacgacccagccggaaaggaagcgattgttcattagatgcgaatgtaacttgcgttagttgggtaattagtcggccacctctccgcattgttccagctctcgctcgatggtcgtacgggatcttttaacactttcactggcccatgggttcgacctagacggatcccgacaccagctgttctatcggcagcttcaggactattcaagtcccatgatgcgccgccggcccggtctcgaagctttcacggaacccaggtaacgagttctgttcgccaatccacacctttccttccccttcccccagctccctagagcaacctctaagatgtggaagacgattccgagtttcgggcgagtatcggtattcggttgacgggaaaaattgacgactgccgttgagagtttgcgcatcgcccgcgaagagattcgaggaagacggatggttcacttccagggctcgattctcctcagagtagcagattcgggaagtgttcaatagggctttcctgaatagaaacgggaataaaactctcggccatctcctctctccctgttcttcaattggttctcgatccggaacaaagaggtggaagagaggtttaaaattacatatctagagagcgcacgggaacaaaaccattcggacgcaatttcacgcaccgcgacggaacgtatgcacgaacggaacgactgcgagcggcagggcaacgaccatcggtggattcgaagcgttccgtatcagaaacggtctatgaatacctcggtgctccagagcgcggagtttctgaggaatggaggcaggaagaaacagaagacgaaaagtccctaaggaaagggggagaggggaggaatggcagtggcgttgcgagtttgccgagagaaaacacgaaacgaaaatttaataaaaggccggcttcgttcgcttagtgatcgaatgagtgtggtcgaatcgtcggttgctcgctccttcgtccgctcgctcggttggttggtcggtcgagctcggttttgtacgcaggtaaccttcaagcatacatcgttcgagctcctgacccgagtgaggtgggcagcgcatgcgcgtgactaacatagcggccggcaaatcgggtcaccgagcctacctgctaacctccctctttgcctcccgaccgagcaacggaagaactaaccgccagcgttgttattcgaccgcgacgcagcttcatcgaaatagtgattcctgatgcactgtatcgtcaccgagactcctgcgcaagcggtttgctttgagccaaaacctgcaggcggttgacgccgaatacataattacatcgcgaagcaaaaagacgacggtttcccgagctaaaaccgctatctcgcagtaacatgtagccacgtaacggaacgctaatgttcgcaaaaaaaaactccccgtttcataaccagcagtcgtcgtcgtcttgtcgggcgttcggatgcttttgttcggcggaagatgcataaacagagttgtcagcggttgtgctgtcgtcgagccgccgcccgtcttcatcaccgagaaaagaatcaacgatccgtgatgtatctatccttcgagggatcgatcgatgtcgattgatcgagctgcggagggtcgagcaaacgattagcgtcacaagttacgaagagcccgagtgcactttattcagggctcggtcagaatatttgttcagagtccacgtaacatcgacggcgttacgtccgcccacgctcacccaccgctgacttctgggagcagctgtccacccggtcacgtttgagcccgccgttcgggactcgacgtgaaatcgtgactcatcgccccagcagcaaacacaaatccgcgggagagaaacgcatagcgcccggccccctctcgttcctctctcgcatcgtccgcgaggctcccgccgactgaggggaggtgccgcaatgagacgagatgagccctcgccggacaggaacgagctctgaccgcatcaaaccgagatagggacaaactggccgggtcgagtagtccttcgagcgagtcgcttaggcgtccgcgacatcgtcggcatagaggagcctgagagtggccgcaccgtgtccctcaacaagactccgcgggctatcttaacgaccagaggctgccaagttaggaaggcaaaacacccagagagtgtgagcgctcgcaccggcccgaaagagtggcgagtatgaggaaagcccgggactcgagcgccctggtgtctggcatctgatttggctttggttcgtctatccagccggtccctccttcgccggcggggagaacgcgaacccgtgcgtctggatggcgccaggacccctttaggagaaagccggaccgttgccagcagccgcgggagccagcactgagatcattgcagccgccgccgccgcaaccaccgcgggaattcaaccccggaatgtcgaccgagaatccctccagtgccgcgagccgttgaagacaaacgttccgaatggagttcactagaaacgcgaactcgcgggaaacgatcccactggataagggtcggtggcgacgaagagcggttgtcaacgatcggcgtcgaaccaaagaacgttgcgccgcgaagatcctaaagctcatctgctctggagctattttgattgctgttccccgctcccaatgggattataggtcgtcgtcttggagcgacataaatagctttagcttcgaatccttctccgcgatgaggatgcgctccggagtgccgcgtgagtacaagcaattgaatcattcaacgtgcgcggccgatcgggaccgggcatttgatttcgcgtctccggattcctggtttccgtgagaatcgtggcgcgaagttcgagcactttcgggacgagcgcagatttcgcccggttcgctcgagcggtctctcgggagggaatcgggaggaggcgttgaaagcttcgaagttacgcgagttccatgcctgcgaacgtttccagcgctgggcctcgaatcgatcgcgccgcggttttcgcgtggccgtgggtctttcgccacatgctcggcaaagttagtcctaacgcagtttcacttttcctgtatccgtttgtttattatgctcgcgtgtggccgacggccggggaacgcgtgaatgtgtttcttctcgcggtccgggcaagcctatcagtggtaaggggtttggcaattctgtcgtttctcgatgcgcctcgccgcaaatcggcaaaaatctgaaatgcaaaacacgaggagaccggaggatttccgacgaccgaggccctgcgccgtcccgagaacgagacgaaccgactgtgaggcttggctgttcacggccaactctacacaggcggctgttgcgagcttttcctctcttccgcgtcgtcgttcgtcgtttttgcttcgtcgtcttcctctcgttgttttcttctgttgttcgaggaaactcgaaccgttgcttgtgactccctccaggctgtctttaagactgccggagtgacccaggacgccaagagttcagaggatgtcaactccaccggccggtactcgagcatccctccgtcgtcgtcgtcatcgtcggcggcctcggcgttcccaaccgatgtcactgacctgttgggacagagttgggagacgagacgtcgacacgagtcggacgatccgttcaattttcctcactgcaaaaacccacgaagccgagcgagccaccatgtaggaagggatccctcaccgagcccttatcagaaatgcaaaggcaagtcgtaatcaaggcttgctctttagatctcctcgaatccgattggggagtccgtgcgtcgtatgcttgaaggagctcggcttgtcctcgttgcgactctctttcgaagtccgccaacactgaagcgtcgcgggactcccgagggagagaacggtccagggcggtccggctagacgatgagttgcctgccgagaaacgctctggatcggcagcgcactggaatcgggaaatccttctgatggatcggtgtacccgtgaaccggtacattcccacggccggaacctttcactcatggacgaacgaacagggtcgcattctgaaggtattctcacgcggtacatccaatgggaaatattctgtgcactgggaaggcgagctcagccaggcattttctactcgaaacctacgaaatgaaggtcctcattgcgaggcgcatggtcagatcggaagctcacagttttcggcgggatgctctctactgaagaaccgcgaaccagtgctattttttttttccaagatcgccgccctccctcgagcgtcgttgtggaagggattggagttgacagaaattcctgttccgagcactcgaacaagaaagcccagccctctcttggtgagcattgttcatggcacctgtcacgagtccgagaatcctgttccgtggattccgggtcaccggcatctgtctgatccattctcgtcagaagattctgaaactagtttttccggatccgatctgacgatacgcacgccatgcggcgaagataagaagtgggatagacgagcgcgctgcgctttctgaatgtcaaattaaaaccagaacgacgagaatagcgattgtttacgacagcctggcgacagaacgtcgacgaggatcctctcggaacaaatggtaagcccaacactcgacgagtttcgctagcataggagtaaagccgagtttcagccgaggccgctgcgctgtgacactaccagggacgacagtggacctcgaagcgttctgattagccgcagaaaaaatgtcggctccgcgtcagaaattgaagctcagttaaccgccgaaacgtatgtagcggcttcctagagtggggccttaggtggggcgcccgatggctgagtgaccgggtcgaagggccgcgggaggggatggaggccgctgagggaaactagggcactggaggggactggttgctagacaacacggatacattctgctatgatagtcgcgaactatgccctattcagttggagcacacagcctttcggactctcggcaagtctcgacccgcgaccgcctttgagcgtgagaggcatgaaaatcctgttcgacgtcggttatgggaccctcttcgatcacgaagcggcgtcaaagaagatatacattgaagccacatccgacattccaatcgaaacgctgagcgacaaggccccgttctagtccttcggcaacgacgagcgcgagtgcatctcgacgagctctcgtcgcacgtcgtgattcatcatgagggggatgatgtctctcactcagcacggcgatggcttcacgaagagttccgccgaggcgacgtgtgatccggatcagaaaatcggattttgaatattcctgccagggacgctgccggtcataaagttcgtatggggaagccagactatatgtgagcgtccggatcataaacgaaatccccagagcctcggcagagcgccatacccgaagtaaaagagcctacagtctcgattgagacagctcgcttccattcgaatcctctggctctcaacgacgtgaaccggacgcagagctccaccactccagaggcactgcgctcacaagattatacatgtcgtgttcgctgcaatctcaagttcgcccgcttccccgcatcccgcatgcttgtttggtcgcccgctcgcccgcccgttcattcactcggtcggtctacagccggtttccggaggaaaccacttccccgcgcggttccgtcgtttccttgcgatctttttatgtggtagttgtcgtgttggccgctcctatcgttggtatgcattgatatggatttcaaggacgattccggtaattggggaactctctggtctttccgaactttcctgttcttcccccgcatggagtttttcctcgaacaatgatcctgagattccgctcaccgtgaagtcattacgcctcttcgagaaaccgagaagagatctcaaatcatgggaacccttggaatggggagaataaacttcataatacatcggaagagacaagattccgctgtgaggatttcccatgggaggtggtgactgtacccggacgcgtttaagttcaagtacgctacttgccgacggagttcagtggacccgggcctcctgcacaggacgcctcaccgtcctgtatccggaaaattctcgtcgctcccggatgttgcgaaggctcttttattcgctgcgatcgtgatgcatacttgctgcttcctcgctcgaaattcctgcatcggtcgcgcagacaaacgccatcgactcctcgcgggcgaccatagcggagcgctctcggggacggtctcgtgctttcctggttgtgtcccggagctccgagtgcgctcattccgagaaaaagatttccctcccccgacagacactcggaggagtttccccactgagactccttcacgggaggatttgcagcctcggaacccaaatccttcggaagcgcaccgagccctgctcacatgcagcacagtaattagcgatgagatccggaagtctccgcctgactcaaatgtcttcaacctttcgtttctcctggagccatgaagttctcggcaagccgtgtcctgatgtattctctcggctcgcccaacgacataaacttgataaatgtcccgaggaaagttatagtcctcgaccgtaaaaaagatcgctgtcgccgtcgcgagtgaaaattctaccaaatcagctcaaacggcgggacccttgtccgaggatcacgggagaaccgttgcgctcccgacatccggctcaggcgccattcgtttatcatatggccgatggtattccctcattccggggaactcgatagacttctcaacttttcctcgagtttgttccccaattggcagcagacacgcgagccgagcggtgcatccaacgctacgaaactttgtcaagatttgcgaacaaaatacgaaaactcctcggtccccagaacggcgagaatagcttcggaattcggcgctttgcggacccacttcccgcgtctcctgtcgctggccgtacattcactggcactggagacgaatgcgcatactccactacgaccgaatgacgcggcattcctctccgatgtttctattgtgaacgactgcgagaatttctgttgacaggaacgtcgccgtaaaagttcacacagccttcgccatttgacgagattactgactgggatgatgcatgtgtactcgagactccggagcccaggcagtcgctcgcttctcacgtcggattcgcgctggcatggggaccttgaacgtcagcagcttccgctgctgcggttacgacgtcaacaacaacatcagcctcatgaagaatatgacgcgtcttgaacagactctccgccagagacagccatcgtcaccgagatccgacgaatgcgtctacggatcgtcgcgaggaccccgagcgccagattgtcgacgaggattcgcaggagaggacaccggatgcattgttcacgacggaaacggcaggagtgagggaaattctcagaatgattgcggtggaacgatcgaacacgcgtcccgccagtgcgccgaagagactcgtgaagctgggggagcgaggtcagcgaagctagagctctgaggcattccagctgggtatgcttcataatatccgttacgtatgtatgtgtatcgtgcagtcttggagtgcggggaagtggagcgtgttgctcggctgttggccctgctcgactagactagacgaacatcgccggatggaggccatcttcccgcatccaactgtgatctgaggggatgcgggagggctgacggagagtttggcctcctaaaatagtctggtcacttccgcgaatagtcctgccaaacaactggactcactcaaccgctctcgtaggaacgcttctccgaaaaccataaacgcaaagggagcggaaaagaggaaatgaacgggttcggcattttcatcaacatcactgtcgtgatgatggtggtcgttggctccccgcgggatcgagcctaaaaacacgaatcgagtttgtcggatgcattaacacatcgcggcgaattcgtactatctctcgagaagctcgagatgcggatccatgcaagttatgaaaagagccgacgggtggagaggagcaatgtgcaagaggcgaagtttgaggagcggcgaatcggaggaaacaggagcgagatggggacagagaagaatgggaggggaggagatcgagagggctgagccgcagcgagcagacaaccagagcaggcccggagggagtttgcggattttcagagaagttcgagggattccttcaccgggacatgaagtcgagacgcggcggaatcgttcgttcatgtcagcgagaagcatcccttcgatgactaggcttgcattcccactaggtcgcgtcgcttgcgaaggacgacctattctgcggccgaattcgtcgaagaatcctcgacgccctcgggaagcgcactcctgcgtctgctgcggagaagtcgctgtcgcatccaactcctgcatctgacacaatcatcaaacaacccggctaaagaggttgtctatcggagagaaggctatcgtggacttgcggtaatcttcaagtttcgctcctacgtataactcgggctattgagaaagagtggtactcacgtagcgagttgtacctcctgatgatattctcaaggaaggtattttgcggggcaacaaggcccctgcggcctcctggcatggtcaccattccggagggttcttcgagctgcggctcgggtcacagatcagatgaagatgaagtcaatttcgcgcacaactaccgactgcggtcgtagcacttccgccaccagcaggggtaggaagaagaactaaaacaaccacaactacacctatgacgaattcgatgaagatgataatgagtgacgagggaatattccttgctcctcccttggtctcgaatccgggtctgatcttggctgtgacggccttgatgacgatgcccaaagaaccggaaggtgaacaggccgcagtacgggcgagcgagtgttaagcgcctagctcacgaggcagttagcgagaacaagttggaagccgaacttcgcaagttttttcacgaaaaacttgcagcacctctgatctacatcaggacggatccgccttgaggcagactggtagatggtgctcacatctcacaaaccgagtcttctgttatttcgcccttgtttcttccacagtagttgtttccgatatattcgggtgttttcacttcgaagagtttcttctttcgtcgtagcttgattttgtcgctcttcaacaagaacaacttctctaatggtggttggttgattggtcggttcgttttcacagcactcggcggtttcgctttttaggagaagcgtcgaagaaagtttgtgttcattttggaccccaccctagatgggcactcgaaagatcctgaatccgggagctgattatctttaggagatcatccgatcgagaagactttgttttgaagtgagagttatttccaagaaggcttggatgattctgtcgagtttggtcgtttcggtgatctttcacactgaatgaatgaacgaataaaagaacgagctgaggagttagtcgggtgccgcggtatctgattaactgaggaaatttcgagctcgagaagcctcaatcagagctcgatgcacactctcacagggtcacgcgctccgtctgtagtcgaacagttgatcgctgtggctcgctagcgtctgcggaagaacaacggacctgcgtttaacacttctgcagaaaactctgcatccatggatatactccagggcagctcactgaaaagcatggatgggaagtcggtagaatgcgttagagtggagggaggggcattattggggaacttcaaactttctcgttgaggtctgaggaaaaggaaaagactctctctgactggccgcagcttttccagacttctcctcccgggaaccagggtttcctgcccctcgctccacatcaagccacacggtgaacgtcggctctggccgatcaacggtgctggggtctgtgcatgctgttcgagtacctatcgattttgagcgctttcttacccgaagtctaagctcgagatgttccagttcgaatcgattcaggaataacagctaaaattcattgcgtcacgtattccatcgtggttttgagtggatcgattactgcagaggtttatccaaggagaaatcagcggacaggatgaggcaattttcgaggttaccgctttccaatgaacttctacacagggattccgaaagtagcctgagaactctgaatcgtgttcgtgcttcgccgtgttctgcagatgtcaatatccgattggctcgcagggatccgatgccgaacgaagaagaaaaaatattgtttgaaggttagagctgaattaatttgactatggtttcgcgccgaaagtgtgatttattttcgctgtttcggagcgtgttccagcgatccgttgatgtcgacgctggcttcctgcaccgcgttcgattcacgctgtcggggcgagcgccgcagctccggtcgtcgtggaggagacacaggagccccgctcgcaggcacgcctaggacgtcccgcctcgcccgacgtcttcacggcgccgaagcaaacgcagacgttcgcgttttttcttctctgcgtcgacctagcgagatagaagcgggaacaattcaatcgggtgcattgtagaggcgatgaacagtcatcctggcgctaagtctcgattctgaaatcggaacctcgatccgttcattgtggcttcggatttcaacgatagcagaatcaccgatcctcggcgaggcgagttccgacgacagagattttccgagagatgttcctaatcctttttttcttcttcgttctcagaccgcttcccggtgccttgtgggctcttctgtctgattttcgttcggggtgcttcggaatcgacggcttgttcttttggttcaatgcaagcagaactttaacgacggctgctgtcggtcgctgtcaattggagcgggaagcacgtctgtcgcacggtcagttggcgaagtttcgcggtgcagcacgcgtggatgcacgcacgcatgcgtatacgcgcgtaagtaagttcgaacgcacgcacgcacgcaggcaaacacgcgcgctcgtccgttcgtacacacgcacgcacgaacgaacgaacagttcgacgacggcgacgagcacgcgacttaacgcagccacatgtggttggctctatctcatgcggtatgtgttcatgtgtcgcagccggcgcggtccaggcgcgccactgatactttccgccacataaggggaatggttggtgccctttccgtgccactctttccacatcctcgcccgaacccacactacgtccgtctcaacgaccacgacttcgaccaccaccaagcagcggcggcagaggacgccctcacgcttcagggctccgagtggagannnnnnnnnnnnnnnnnnnnnnnnnnnnnnnnnnnnnnnnnnnnnnnnnnnnnnnnnnnnnnnnnnnnnnnnnngagggaatcgccgagactactggtgtggtgggtcgagagggaaagggcgcgcgagggggaggggggaaaggggctggacttctggggataccataccgcagtctcgttggcgccgtttaccttcgaagtcggcggatcgtcgcttgctttctcaggctagccttgctgcagaccctttctcaacagccccctggtgacccgacactttgcgcatgcgcaaggtaaggagctctccggccgtccctcggcccgggaaacaccttttccactatctgtcgctcggtccgttcgtctgtcttcctgttggtcggatgtccgtctgtcgatccgagcgggcgaccgcctgtctgtcagtctgctctttctctacttgttcttccgttgttcattttacctccggctctacctcaactccgccaaggcttcctgcgttcttcgtccactgtctcggagtgccacaatccctttgcttccgaaacctgttcttttgtccttctgcccttgttgtagagttgtttgaacatcgctctgaggtttcgggtcgggtcagattcgccacttccaagttccacgcctgctctcccagtcctgctccggagctaactatctctgctctccgatgcaaactttttcctcgcgtctcgcctccaggaagcacagagaacggttctccctctcaggaactttgcgatacatgtctcacatactctgtatgctcagaagaggatttcggttgtccaaagggtcggagggagggaaaggagtagagtctgatcgatgagccatggcgcggttgcgttcgagtaacatttgatggaatcgattgcgaaggggatgaggatattctacgatgcggatgacctcgatgaagagttcagggtgtcgccaatctattatagatcgagagccatgaggaatctgggattacatcggcggctgtcccgctctagaaagctttgaagcagactgctgacgccgatgttcgttttccgacggagggacccgttcaatcggtcgcaagtctctgtcctccgctgcagcggattgcatgcgctgctggagccgcggtaacctgttgcatatcgaacgcaagcgagagctgcctctcgctgagcctgcagacactgtcaaacgcgaaaatcgctcacttcaagtgtgtgttcatatgcttccgtgccgcgctggaggatatcccaccagccctgtgcgcaaagactcgcagcactcgcattcgcatcgactcacaacgttcatctggttacaacgtatcccgggctggtggcaagcctcatctctcatgtggtttgctcgatggaatggatcaaaaatatattcattgctctcacaagaaactaagatttttccttctcgaatctgattcacgggtcttgaggctatggtcagccggggaggtccgccggacatgatcataacgttctgcgatcccggacgctaccggcacgaattttagcgctcttcactatctgctgtgaccaacgaacgtgagctccagggtcagtctaaggagtgcccgtttggttcttaagggctgacagctttgtattcgaacagtccacactcccgacacgagcggagactcggaacacacgctgatttccagcctggagggagcacgcctcgcctgcagcattttagagccggggcgcttcgttttatacggaaatattgctgtgcaagccgcgcattgtttccgggatcaagattcgcctcttggggacggttggttcacgtcctccgctctcgaagtggaattccgcccttcgaacgcagggtttcggcgcaaaaccgattccgaacctatcggaatgcctcgctatttcgcactgttcgacatgtaggctcagcgacagcttccatgtgaaatttgttccatccgaatgctgagcgacacgatacacgaaactgcgactcagccgcatcaggaaggagacagacgaagcatcgaaaaaagcgcagcagcgggatagctcatcgcctgagatatcgaacggaactccggaatcgggccctcatttcagagaaactccattcaatacgaattggggcctgcgaggctcggccactgaagctatggtgaaattgttcccatggtagactggatcctcatggcagtagacggaaggccttcttattggtgcgttgatggaacaccgcggtccaccctcccaatgagcagaagaatgaggaaactagcaaaaggaaagttctacgcagggttgaacggagtgactgacgcaggatcggacctggtctaatactatcgacaacgataaagagctgtcgagggagctggctcaggcttcccgtcccgctcggatccgttctcttgaaagttggagggcaaacttagagagggataacgcggcaggggaaaaaaaatcgaaaaagggagggaaaaccttcgggagcatcaggtgtctgggtccgtcttgattacggatcccgcagcaacgtggaagaggcacatctcggagtcaccgaagatttttcgcggggtaatcgggaggctccgaagagagtttgtggtacctgcgagaacttcaaccagttttcggaccacacggcgtccacccttgctagccgtccagtaatcgagcccgatcgctctcctcaatgatgacagagtcaacctcgctcggaaaactctcctctttccctgtatcgtcagcctcgattcctatttacacgattagagggagacaaggtccgcgccgttagctctcttaccgagttggacccacggctgtagcccgtctaaggaacaggctgagttccaccattgaatcaagctggtcgtcagtgctcacgcacgtggactctgcctgacgggagcaaccttcctacaaacctgcttggaacaggacgaagacgaatagcttcgaggtggtcatgtttttagcaattagaagcgccggcgcacagtggagagcgcgaggctcttgatcgacaacgccgatcttgtcctgtaattatgaatgagatcacgaagccctttgtttctgggtaataatcgcaccaagttccccaagttgtgaatatttcgcgttcgggaaaagaagacggaatccgtgacttttctcggctgttgtagtctcattcagagtgaaaactgcaggcgagcaatcaacctggccgagagatggggaagagaggaaaaacgaggagagaaatctgggcgtgctccaacgatctctttcggtcgaaagacagggcggtgttctcgccgatcacgagctctcccgcacaaggcggagtgccaaaaagtcactttcgttcaggtggggtggacggacgtcgattcttagatggagcattctcagacgagagtttggcggagcttgaggcacgtaaacggcggagcgttccgttaatctggacgcgctaatcggcggataaaagctctcgctgtaccacatcgacggatggtcgattcattcgagctccgtcctcgcagcagctcaggccgccataagggtcctagcgcccaacactggacacggaaatccacccacgcaacgaacgcgacagtgcgcataacaggaagtgaaccagccgagggcactgaggccttctcaggttcgtcccgaaggaactcaaggatcccgaatccggatccatggagttcaaaggagccggggttcctccctcagtgtggagcaacctgtgcgcgagcaacaagtgcctctaggcttctcttagccctttcccaattccctttgtgcccgcttccgaagaagaagaatgagcatgggagcccaggagagccgatatggaatgagaaaaaattggacgatgtcggcgcgtcggaaagaacgcgaggaggaagtgaaaaaggagcgaaaggggcgaggcaggcgtgacgacagcgagaaataatagccatgacgacgggacaattccagtcgcagcctcggaaaggaaagcaacaggcggctggatcgaagccccgagtagagccttatcgctcgaggcttggagcaaaatagaccgtctgtgctctctccgcagccagctatgaatcagagaagaaatccttccagggatcgttttccccacgggaaattgatgaaatcaaccatcttcgcgtgagtccgaacaagaacaacacgaactactcgaaacacgcgggacgacgatgcgccttgcccgctcccggaggagaccatccgagtccagatttgacaccgacggcacggcatcggtagtaatgcgattagtgagggactgccagtggatttgctccagactgctgcctctgagctcaatcaattgagaaaacgcccccgggaggttgaaagcggatggcaccgacaggatacgatggtcgcgatgatggtcctccccgacagctgaaaaagtatcgttgtctagaagcgtcccttaatatcgattcgctgagctcgagggtttcttccttctatctctgagtgatctctcaatcatcccagagcgaattctctctatgaagagggagcgaaactttctcgctcttttagcttgaacttgatttctgtggaggagtcgccgttcggttgcgtttctgatgtagccggataaagagccttcgagggaactccctcgctgtctccagaaagcttcccccgtgccattcccactccatcagaatattttaagaatgttagatatgttgggagtgcaccgaggaagttctgattgaatgagctccgaagttgaaaagtggagaaagcggaggtcaaacgtattagtcgagtggacagtgtagcacttgatgcgagctccacagagactcgaaacgtttggagaaacgagggagcctacgacggattcatggaagccagctcgcccatcctcctggggagccaggtgatgaagcccatgcattctcgtttggagggttcgcggcgagatcgcactcgcgggtcgagccacgctagacactccaagatgcatttattcggttcgatgattttccctgatgattgcaccgccgaatactctgttcatcgcacaatgtgccggaatactcaagtcatggttcatggttttattgatcctcataactttccgtactttatcaaggaagttatatcccttccgtggcaagggcgatttttctggagataactcggatcttcttttcccatcgcctaagtagatcatttgttgagttcgtagtatctccctgttctgtcacacatatgctcgttgagcctcttctatacttgtcatactgcagactggatgtccgcgccaattcatttctctacatgctcttttgcttggactctttactttctctccgtagaatctgttgagaagcgttcagccattctccgtctttatcagccatcattcaaaaatcagagagctgattctggtggaaaaccgaatcttgcactgggtctctggcgtttcgaacctaccatacggtcgttcctaggacgtattcgttagctattctatgctcaaagattcctattgcccaccggcctgccgccggcttttcaccgagtgagctgtgagtgcttccgaatttctcgaagccgtcatcgcatttgcatacgtcagagctggcaccgctgtagctttacattgcgttgaagaaattccaaattcatcgagagtccacaggcaccgagcgtgcacccgttgctgtgctacttctgaattcttcttcagaaagctctctcttctagttttcgattggcaatactcatgatatttctgagatatttgaagcaatctcacagaacttggcgttttaatgtggaatatctgcatgtggcttctcaatttacggcagaaatgccgcccaacctaactagcttgtattccctatttcatgcgttgtattctcgagggaagtggtcgcccaataatcccctcatagaatatccatatttcactcttttttgggttggaaactaaacgagcccagtaaccgaatcccgagttggcagtcagaagcaccttcatctcctcataattcgagtcttggagaactaaattatctgcgtgcagcaacttggtctcttcgtggcctgttctggctgtgggcgaattcccgcccaaaagccacatcttgttcgggagattcgccgtcacagcttagccttgttgatcggagacagggaatcggtgacgggaaacaaccgacgaaaaagaatttctgctcattatctctccgaggagacttcatcaagttttatgacaacgtgctgcctcgcgttcacagggtggctcctttagatttggaattcccaagcagaagtttgttctgatcataacctcgtcatttctcgagattttgtcgagaaccacagaaggatcggtagtgaactccaagacggcacgatacggtttttttcttctacaatttgatctgcgttcaggagagcgttcggaggttcaactattctccatatcaaggtccttcttggggggattgggaaacgcccaacatcgaattcgagctcgctcggtcgtgtttgatgctcacaaggagcctggctatccgctaggactccgatgatggaatttgccaacttgttggctccgacggtagagtcagttatgtgatctgctggttcattgtgaaggccatgaaggcacgccgattcagaggtggggttgaaaagttccaaacgttgctcgatattttcgagcgtgagctgaagagcagatctacgattagctcctctcagctcttccctgtttgaatccagtttttcaggagcacagaagttcactgtggaagtcggacggttcttggattgattccggggttacgcggtggccaaggcggggtagcgtcgtgagcggctccatccaagaagtctttgctacctaggaggcgtgtgaattctttgaccgtctgtcctggctccgcaacgcgggaattccgcgtgagctcgagtcatccgctcggaacgctgtgcgccttcgtccgcgaatgaccagcttacgtccagtgatatggtcgagcagtcagcgcagtgtgcaccgcgcacgcagactgcatggccgcattgaggtcgtctcgagcatagaggccaaagcatgagcgctcttttctggacggaccactgacattgcagtggttccgagtgttcccggtggatctttgaggctgctgttacgagcagccgacctgttcttgagacttgaacaccgcgctggggactagcagaggttcggcagcggctggtgggaattactcactgcactgatatgactacccccatgctctggctatcgcattgctggttgcgggaagaaacacagcaagaagcaaggatgcaacgttccaacaaataatcaggatgagttccgagtgaaacttgaaaaatttgaggaggccgcggggcattgagaacacaaacgttcgcgtctagcttctccaggaggggggggggggcacgtaatcagcatgaagtcgaagatggtggccgaaacgatggagaatgatccctggtcctacataaaaacttccttccaactgaccggatgagcactcgttcgagtccaacatgaaccggataacgtaatcgctaccgggtcaagttgctcctcgagtttaccactaactccgcagagataggagtcgctgcagtgaaagtacgtctcatttgcgttcttccaattgctgaagagtccaacgactccaacaggttcgctacattcctcacttgaggctccgtggagatacacggtaggcaatcaacccccagagttccctaggttttctgttcgttcccgaagagaatttcgcgccgggaagcgtagattgtagatgactcgggagcaatctcacgagttcgagcagcgactcacaacgacgatacgtcctcctggactcatgtatgtacgcctggagcctccaggacggaaggatcaacgcggctcagcttcactgcagaaccgcgaaccgtgtggcattgtttcgcgtcaaatgagctgtaattctggtcttctctgtgattcgggagacgagagggttgtgagatacttggaaatgcgattatccacggagcgtcccagtccgattgaagaaacgcgtcccgaacagggaggatgaggcacttttcttcggtgagcacaaatgatgttgtgagagcgcaagccccacgctacagaggtatgcctgtcaccgagggagttctgggatcatccagcttaccgagttccacgctatacactccgggagattatctgcagcctgcgtcctcggcagacttgaggcgagataaagtagacggcagacccggatcggttcgagcgcgacagattggaacggcaaggagggaaacaaacggtgagcttggtgagcgcagctcgatttgagcagagccaaacctggtgccgtcccagcccctccccctcttctactcccagctctcgagccctgtttcgggtccactctttccgtatccgtcgtttccttgctgcgaaacggaggcatcactcttcacaagttcgacccgtgaatgtttcattagattgccaggttgcccagctgtcagcgtcttcagaatcattgtccgccaataatggaacaggtcgccactggtcaagaccaccaggggtccaatcaagtaataaaaattctttcaaactaatctagcgaggatgaaaaatctgacgtcggctcgctgcgaatgtgctggagatcggactactcattcgcgatgattcagattcagttcttcgacgatgcctctcgatgaagatcgagcactctccctgtcgaggggaggaattgtgatcgttggagtttgccgggttcgacaaaaacagaagcctcacctggtcagcacttcgccagttgtcacgtttttgagttaccaggccatggcagggattccagtcttcaggtcgttcgcgatgttaacaccacttcctccacgattgtctgagagaccattgcagcctcgttcgcgagagcctctcagaatgccctgagcatgtccttatttgtggactcataaccgtgcagcacacttgaattccactcgaccgggcggagtggaaacaactgctcttcttctcgactagacttctctccatgggccgctcatgaaatccttcacggagtcgtttttgctctgtctgtggaacaacgttcttgccatggggctcgcttgcgcctgcatttcataaatgaggcggcagctcggactttctcaagacctcagccttgatgagttcccgggaggaatgcgatccttcacgatctccttcgctggatggttctaggccaccgaggtcgcacaggttttccgaaggcactcgcctacccgtcagaggcatctgaatcccctgacggaacggccaagcgttctctccataatggcagaatcgagtctcgtcgccgagatgagctcaccgccgagattgttactgatgatggcaagagctcatttctactttcggaatctgctcaaccaggccagagatccccgctcaatagagaatggtgatacgaagggatccgtattgcgagcaaaactcataagtacacctccactcatgatcatccgggaagccggcccggaaaagttttatccggttcgtctcctaggaacaacatcgaaaaaagcaacagtttcggctgtggctggatttcggagttttggaagtgatttccaaggaagcagtgatatgattagactcatgctgcgttcccttccggacgctattactcggagccccccgagcgattttgggatatctttctccacctgaaaactaatatgaggacgcatctttgttcgttcaatcgggccgtttcccggacgtccacgacgaaggcgaagttccatcctcctcttaaattccaccgaggggatccttgtttttcggggaggtaaaatatattcagcgtcaggaaactcatcactgatgagtcaccagcaaacaaaacgaaacctttcagagacttctgactttcatttcccggattttttcatctcaaactagttccaatgaattctattcaacatgagtaacaatcagaaaggagttacttccgagattgtatcgggcatcaacaatatataggctgttcgctgcaagctgagccacgctcatggtcgcccttctttcggccataactcagcctctagtggatatttctccctcatggcgcccctcatggcgaaatactcgataccaagtccgttcgagggagatcccgcaacctttagggcttatggaagcttcgggacgcgatgtaggattcggcgaatgccgtcgccggattccagaaggacgtcgcgctgctcgaaccgggcgatacgctgctccagaccccgggcccaaaacctcgatgcttagggtggccggctcgtccctttcttcgggagcctactgctgacagacagacactgccctcaatgtagagtcatgagaccttgaggagtggccatcgattctcgccagcatcatatcggggcggtgtgccggtcaaacatgtagccaataacaatctgacagtttctggcatagaggtacttcactccctcttcattgggtcagcactatctcagaaacatttcagaccgacccgggaataacctacttagactccgagaaaagtggtcagatcgacccaccaagcattttcatagtccccaagaagtctttgtccgtccctgtgaaccacttcacaacatggcgccagttccatgtcaatcttatcaatcgcgttgaggctcatcgaggacattcggaaaacttgatttctatgagacctgtcatagaagagggaaaggaggtgttaaggggagaagaggaggtggggtgggtatctcatagactcgaggagaggccaaggagtctagcttcacacctgatcgttacgattcgcataccgctgatagtatggagggggtcacagtgggggttgattgcgagcgggaggaggagagagggtgtggttggcccaagtcttccgttggaaaacgccctacaacatgccgttggttcgacgtcgatcccatcaatcccggagaagctcattgaggacaaacaaactaacgaacacataatcacacgaacagatcctggatttttacgtaaaccaatattaagaacagtgcggaattcattatatgtgatgataataattgtacatatacactgcggaatttcagccgataccgactgaataagaagcctcaggtaaggatccgctgaccgctgcactgttgcctttctggacctcgatggacagacgctgaaacagaaactccgaggctcttctgtctcctgtacccgttttttaatggtatcttatcgaccatatagcgattgatagcgaatggcatgacgaaggtatgaagattggaccatcgatgcagtgcattgctatgatgataggtcaagttgaatttcttcccttgttcgagttcacgctggatccgcgcgctgataggtgcgtaatggttggggatggaagacgaatcgaacgccttcggaaggatcgcaaatccgtcgagagttggatttggattggattcatttcgatcttgcatacacacatatgtcccctttcatttcagggttgaattgtttcgtattcacagatcatttttggttttcgatttcccatcgtctcaggatatccttcgtcctcctcaggtccctcggtatggtgtttgggttgacgatttagaggactgttgaagtttggcgtcgagaaaagcgaacagtcgactccgacgtgttcgaaagtcaccgattctcgaccgaatctcgaaaacgaaaacggagaagatgcgtcccatggagagcaaccgaacgaaaaacgagaacatttttcctcaacaatctgatcgaagcaccattgtcgatgggacgccggtgggacgagctcctcatttgtataccctgtatcgtagattgcgtatttgatcgagtttccgtgacttggcggtgcagaacgagaagcttagagaccaaaatcttgccccgatgccatacatcggatcgagttttgataacagtgtcctgtatggaacgagcggaagactcgtacggcagaaaggagagaatattctatcgctgaatgatgtcagttacacctccgggaatcagttccttgatcagctggaagtcggcgggtacaggagtgttcgggagcgcgtcgtacttgtaagccggaggatcttgaagccttgggagcgattctcaaggaactactgatctgttgggactcatgttgcgttccctcccgtctccataacttggcaccgcctcgagagattttggcgatactttgttgcctggaagctaggagaaggacgcattctatccgtctttccgcttcagatggcccagtgatgagaaaacgtcgtcgagtgtttcgtttccaggaaataacctcccacgatttccaacttgttcgacacctctggccacctgctaacaaggattcttagcgccgacgactcgctctccagcatttggattcttcctagtcatagcgttgtgtaaatgagctatactcccagctttcgacaaggttttccggtcggaggatatgcttcgaatgacggaatacactttctcgaggaaaatgaacttcgtccccgtcttgaacgatccaggtcgggaaagatgcgttctcttccagcttcaggctaagaaaaatcacgtggctgttgttcctttccatgtcttctttttcaggaaacacaccgggtaaagtgaaggttgacttgttaaaacttctcacgggcgtggcggaaccatgtcattcagaccttccagacgatcaagtcatgatttcttgtagatagcaacatgctggagattcgcaggttccgagctttgagctcatgacgaaattatctttatgatcgccgtacttcaaaccactggctaggcgagccataaatatcaacagattgctgatggagaagagtttgtctagaaatatttgcaatagctctcagagcaaccagaaggagggaagagcttggagtaaggaactacaatctcacttacatcgttcccaaagctctgctttcctctatctccctcagtcggctcgttcggctcgcgttagggtcagagctcctctggtcaagtcgtggaatagcagttggctatcaatctttattacaagaaatgtattattcaacagcctcacgatactcgtacctcttcccttttctcggataggcttctctcgcccacttctcaccgagaaacagccgatagaacagcgtgattgttcatgccgacgccgtccattgagtagaatgtgcactcaggacgctaaggtcctgtcctcaacaagagttctctgtcaccagtgagcactggcgacgacagctgttcttctctgagagctggagtcaaccgagagattctcacagaatgaatcaattccgaatcatgattcatcgactctcccatcaagggctcgggatgaatttccaccatttgcccaagcatgcatccttgtgtcacgtcttcagatcaatgactgagcggatagatgacatagtaatattccccaagatcagcctcgttgatcgaacaaatcactctttgagcatcataataagctctgcatgtacaagctccgtgattgcggaatcttggttatcacgaaatggacttgatcacccgagggggtaacaggctaggagttcatcatgtaacgaatgtcaagtcaggaaaggccattcatctgttctcggtggattcgcggccgatctcgacgatttgcttaggcgactgcctaattcttccaacatcattttcatagaaagtgtggctccattgattcgttttgagaacgagctgttccctcaactggctgatgagccaggctagagcgtgcgctgggattgaacccatcgctcacgcgttccaccgttcccgttcgaggcaacgtcgcggtgggtatgctacacacagcgaaaaccactaggccatcttgtcggttatgcttctgatgacgtgtcgtacttggcgttcgtccaatccaaatctgcggttggtatgccgcagtgaccaatggcgctcggctcgattcgtctgaatgcgcgtgcgatgaatgcaatgtgaatatttttgaaatgcgacattgcaatcagggcagggtggaggctgggaggctatggcttcgagtggtggtctcccgaaagagtttccggtgatgaagagataatcggttgaccggatagtcaaaacaaaatgtgtcacctctttggaggggagtttagacgaccaggcgaatagcagtgaaggtactcggtgaaacctcttgtagcggctctctagcggttagattcgggaagcgtattgaagctttggatgcagtttgagttcggatgcttcgacacccaatcgatgcaccttgaagatgtgaactttgtgcagctaactagtgatcatgatagcagcaacatgagcgatagttgcggtatctcctattcatggccacattacctatcattgataatcagggttgataatcaatgttcctgtcaagtcttaaatggcaaccctgattcaatatttctgatgctcactccacatatatagtaccgtatcgagtacatcatacacgccgattaacgttttttcgctaaaacttgttcggcacgcgtcgaggtgagcatcggcctctggcgacagctgactcatgagcacattttcccgccgaaaaagcgacaaaagtgaatgagtgagttgagagctgattacatcaatgagacaatgttggacccacagaaatgagcgtttggtgaatgatgatgtaatgtgtaaacaatgaaaacatgagtatactctgagccccatatctgaagttcctgatcctgaagttgtcgaaagacaatgatgcaccaaatcaccgggagctcaaatctattggaacggatatcacgcgcacgaaaatcgacccttctccgtctgtaccaaaatatatccggaatcagacctcttcttctgactctacagcgagacagagcgtcgagtgtggatgttgaataatgctcagattataccttatggtgacgcatacacgagtattgcagagagcccgctcctctggtacttcagaacgtttcacctggcttccaaatgccgtcaaactcgcaaattttcaggtatcaacttcagacttcctgtgattggataagcatcacgaccggggccaccccgagacctgtgctccagcgttttggttgcctgcactgaacacgaattcattaaactccaatttccagaacctcactcggaagctcacaatgtacaaggactgccagaagacgtcacgcggaagccggggaggagagcttcaaaagactatcacactgcgctagcttactctcggcgggannnnnnnnnnnnnnnnnnnnnnnnnnnnnnnnnnnnnnnnnnnnnnnnnnnnnnnnntcacgaggctcatatttctcctttgctctacgaatcaggtgtagagcgtgagcatggtgactgtgagcaatactttctcctctatggtttatcgaggaaccatccggcattgtagggcccgctacgaaggtcctacggggaaaaagtagcaaccggaagggaatgcagtgttgcgtgtcaaacgcgtcatctatcctatgcgagtcgctcccgcatgagaaaaacgcagttcccgcacccccacgtgacgctgcaagagggttccatcatcagattggacgaatctgccaataggccacaaactccacgtgtctgaggcgcggttctcggaacatattatcaatatagcctaggagttcaggtgtttttccgaagctaggccctcatcgcatcggaccaactccgggcggctgatacgatgattccgaaaagtcacctgaatttccaagcttcggttattatctaatttcttggttccgaagtccgcctggctccggggttggtggatcattgcagccaatcagaaatctgaattctcgaggaggagtagagcaatacactccagagcttcccattcttctctcaagccgctgctcaaggccaagcatggcttgaagactttggaaatatggacgacagcgtgttgaggagtcaagattcgctccaccaggcttttctgatacttttatccttcccgcttccgctcccagatccatccattgtgatttatagataggtcacgagggaagaatcgggtcacgatttgctttcgggtaacggtactatgatagagaaaggatatatccctcgtcgttcacgtaacgtaacgacgagtactactgaaggattactttcgattttttcagtcgtagaggctcggagtgacatttgtcatcttcaacggccaagaaaactacagagaagtgtgagggactcgcggaatgtaatcgaacaaccacttggccgtggatcgatacggtcggagctgttaattgaaaacgttgctcccggaaaagataccactgcggttgttccgttcccagcgcgaccgaagacgctaagtccgtattttccggcgttcgaacgccccgcagaaccgccgttttctcagacgtgcatgacgactgccgtaatgagatgtccatgataagatccccagctgatgtttgactgctttgtccccagtgaagtgtcgtgaacgtgctcccagtcatcagactcggtacctcagtgggataatttctattcttcttcgttcaaagctccggggacgacatcgctcccatcacttcgaataccacggagaatgggccgagtcgaagagaaatgatcccacccggccgttccccgagtggcggaataattcttcctcgattggtgtacgttcctgcaagccgcacagctacttccacgccaggattgtctagaggagagatcagagaagagatacgcttcatctattggacggtcgtttcaaaatgtcatgatcacgaacaactcatcgtgcgcgatatccaacagggcgctgttcgaattcgcgttcatccttctccggacatcaacccagagcaggaatcgaggaggaacgaattcgagattctggggaatccaggagacgagtcactccagttgtcctcggaaggaatcgtgagcttcacggcgcatgagctgcctcccgatattccatccgtcgtcccggttcccgttcatcgtattcaccgaatcagtactcgatcattcggtccggctgttttcgctttcgttggcgttatctatcattggagcccatcgagccaatcggttcgcggggcctttggctctacaggagtcaagtttccgtggatatttgtgtgacctgagaagaatttcatcgctcgtagtagcgtgcgaatccagtgcaacactgcattcgacgaacgcttcacctccacgaagcaagatcagtattgtcctcaagacgatgttagcggtgatgacgtttctgtttatggtgatgatgagattgagcatgcaaattgttttttcgttgtgtctccgtgctaatagaattctcagcgaatgcacttatctcggaagatcgtcgactgcacccggaacgaagtcggatgaccgagacgaccaaaactagaaccgagtagccgggcaacgacgcgagcgacaaacatcggacgaacgcgactgcaacgccatcactgcagggcagttgttcgaattgcaggctgcaaagagcatacgcaagacgctcttggcatgttcagggccgagacctaagccacatgagatgactacactcttgcatcttgactacctgaagcactcgttgatgactcccagacgaaacccggcgccattaatctgggggattccgtttcggtcggaattctcgggtacgaattccgcggagcggctgataactcagggaagcgacttcaacgaacatggtcccttcggaagggaatgagctttaggatacagacactgcttgtctctgattgcatgttgcggcggaaaccgaacatctgtgttgtcttacgcatatggttcaccgcgctatctttcggcaccttcagcgtccattcagacgagaaattgagccgcacaagcccgggtgtggaccgagtccgagcggtgaacgaaatgattgtacccgtgccagttttcccgctgagcagcaaaatttgttgttgatcgcatagcagttatttcaattgccgctgacagcatttagacgaagaacgtcaagctagttacccgaatacgccgcctgagctggtgttggccttgttcgatcattcgatatccgaccctgtgcataaagctgatgaggccttcttctgacggaaacctgtctcgtgagctccatcatacgcatcatttctcctctggttcctctcaacatggaactggattcgatcgaatggattgcaccaaacgagctctggctcaatacatctcaatcagagctcgcgacgcggggctctagatcgtgtacgtggttctctcccaagagctgttacatgattccatgggcgtttgccggctgatcgtcgcgctgattctgatctgcgactcctagatacgagggctgtggtcagccgctcatgggctttatagctgcgtgaaaacacgatggcagcgcttcaagatcgaattggacgctccttgtaatggacttcgaggatcacttccactgaatatttatcctcgcatgaagaacatttcaggatctgaagcttttcggacctgcgcgtgattctgtggaccgtattacccttcaagcggccattgacggagttacgcgatggtgtgatgataacaaaatgacgctttcgtcatcgaaatgtgctgtcctggcggaaagcggtttgagctaccctcagccaacacacggaatagagggccatcttctcccagtaattcacagcatccgtgatcttggcgtgcatatgtctcctgatctcaacttcgatgggcacataacaaacacactatatttgctttgactctctatcttcagatgctttgtgatcaagcgtcctgaattttacatacgatcgtataaggctctattcatgaccaagtcctcatactgctgtacgatatggatgccatccaacgttgaacatgtgaaaatagtagaattagtccgaaaatattttatacatgcgatgttccctccccaaagaagtcatccctcccaaacccattatgtaggttctcggagaacaagattcacgtgttctgaaacgaatcaaactcccgggacagatggaacattaacttgaagccaacaccaacattcttctatgacacactgatgattagagtgttgtgatgccgttatcatctccacaaatatcttcatccaaataaagagccattgaattggattccaatatccattgaggttgacgggctcactccgaatattctcagaaaaccattccgatcgcgggtgcgatacaagcaggctcgcaaggcagatcatgatctagccgcgggtgtagttcttccaggatgaaaaagctcacgtatacgtcttcaggatgtggagaatccctctcatctctcggccgcagtccatgacgtgagccaacgacgtagtcgacgagttggcccagtccactccgcgagtgcagactcgcatggctgcagttacgctgtcctgcgagtaaggtcagaccgcgaacgatggcatcgagtcccatggcatacgctcttacttcgagaatccgctacttattccatctctctcccgagaagcttttctgatgacagccaatctactctcccctaaggcggtatcgttcagcttcatagccgactcaagctcgatgctcgccggcggaaagacacctggctccagtacatccacgatttccttgcactgagcttcacgggacgcgcctccgcgtgttagaaattcgtattcgccctgtttaacgtaacaggtccagcgagccgcacacaacaagtttctgatctagtgattcagggagcgaagccaggaggagctacccaagattcggcttggatcgactggtttagcgtcgagaacatggccgagtggagcgcatgattataaaacattaagcacatctgacggaacaaactctcctggagtggaaacgagtccacaaaaaaagtcgtagcagccccttccgaagctcgatggggaataattgatcacggactatttcgatttctacctgaaaattttgagaagctggagttcacttatccccgtctcgcggaaaaaaaatcgggccggcataatatgtgtcctctcgtgttgatattcccccattagccgcagtaacatttatcccacagcggcggtgataatattcgctgtgctgtttgcagcgtcgcaaaagcctgacgaaccgtggagcgctatcaatccgaatcgaatcagctgcgggatgctcgtccgcaatcgattcaccaagcacgactcaaatccttcttcagtaaaccatcagatgtgggtcacttctcgccagtgttgagtttggggactccatctgctttcccgcagttttcggccttgttcgtccgtgccttaaatctttatacgttagtaccgattcatccgcccgctttagtacacaagctttaatacacttatatctttctcagctgatcgggatcacgaggtttcacaggtgaagttgttgtccgactacggttctggctcgccaccgcaggagcgatttcatttcggatgaacggggaaaggtggaaggttgtcagcacgtcacgctcaacagatgtcatgggaatcagggccagttatcgaggttgacgatttttctattgagttccagaaagcttggaaaaagggtctcggtgacatctggggtgacacaaggagttgaccgttctctagaggaactcaaacaactcgcggaacactccactcgaacttaacggctagcatgtcgaaaacgcaaaggagtttctaacaagccgcctggtgaattcttaagagcataggcttcgggagaaactttcccaccagatgagtggagggctgattcgagcatgcgctttttcctgtcgaccggaatcattttagttcccgcgatttggtcggatgtaaccaacatttcgaactgtgcactggaaatcatctgacaaattgttgttctcccgacgagttttccgatacctctaggaatattcctgaacgttctattaccggcgaagttcctgtagtgtcttgggagcttgatcgaaaatatgacggcagggatgatgggggttgttgctgaagttctccaatgatgttgttcactgttccattcggtttagcggagtactttcacgccagtcgtttgctaccggcaatgctcaatgaccggacgcatctttccacgcgggtttcagctcctggtccaacttcttcggttgcttcggtcgttgctggtgctgctgtcgcttctgctagctttggtggtccaccttctttccctcgccgtgcctccttgccgaaaaagcgaaaattcgcttttcgccaaaaatttaggttataccggtggtagagttggacggatcagctttggcgcttaattctcctctgtttggttgatgttgtcttcggcgtgacaatcgttgttattgttgttgtttgcgctctaggaggtgttgtttttgtgttgcgggtaagattaccctcagggagaaaaggattacaacgagccctgagcggcatcccttcgcgcagtccacattcgcttcgactctctcgacccgcgatgagtgccatcacctggaacgtgttgtgaatgtcggtggaactcgctcacgtgcccgagaagagtggaatttattgaagaggcatccgaactcgatcttacccttaggatgaacagcgggtacggcccgaactatcgtcactacgagcagtacggtgagtttcacccgtgtggaagatgccttacgagactgagagagttgttttcccgaagagcttggatcgtgggaatacatgaatgacggactcgagcccggttatgtcggttacgttccggagaaggcacgagaacatatccagcgtatctaccggaagtgtccgcacttgacttaacggcgagaaggcccgagaaaagaaagtggcacctgggatggatggagcacagtcgaaaaatgaatcagtcaaggctgggatcagattgtcgtcagaggccactgagagattgtccgaactattggcgcacagagagttgatttgccctgttatccagtttgagtctcttttttttccacctctagaagaaatccgctctcttgacgattgccagacgctcgagcttgcgaagttcgctgaggtccctaaagtcaataataagttggtcgggacagcctttcgaagaaggtttttcatgacgtgaatcgagtaactactaccgctgatttccctccatctctcgcccgcatgatgagtctctcatcgctgagcatttgaaggaagccctgtatggagaacgcggtgatgattcgctcaatcaccagggcatgcaaggcttcgagcgccctaattctgtgagcgatcacatgatgggaaatgttctttgagaggatgcacgaagatgaggtagccgcttccttcgataaccgagcccacatttgttaaagaaccaggagaacttctctctgatccgtgacgactacgagttggtaaggtagtatcttctcggagcgatctctcattcaaatgtaatgggccgaacttcatttccactggagactctcgacgattcccttccttctctggctgcctgctcggtctacttggagctgagaccctgaggacaacagagcggctttttacaggaggcatggaattctgcgccaaccgttgggagatggcccacaaaactcaccgcatccagggtcattgctgccgtcgccccggcaggcggaatgaaaaacattgctgcaggcgttccgacctgtactcgacctgggcgtcataactctgcatgaaattcctccgagaagcttccgaactctctgctggacggaatgcctgacagcactcgggagtgattctagggaacgtcaaaccgagcccgtttcggctcgatttcggagacttcacacttggaagtcccgaattcacgggatcttgagcagcggtttcctcacaaggactgctcctcaaacgaccagggtctcgacgagccccgggagaccgttaagctgttcggtactcggatgacagcaaccgtccaccggacgacatcttcccggccatacagcgctgttcattctccggcgatgcagatttctaagaacaaacagagaacaatgcgccgcaccctctggaggaacaatacggtgtggttttgcagtctgcgcgcgacgtttgtgattgatagggccgaagaaaaagatcaaatcacatctctgatgcggattcggatgaggaggttcgccgtcctgcgttggaaaacgctcttctttattccatacgaaccgctgaagaatccgtccttctcttgttctgtccggagcggtttgagagcgggagatttctgactcataaaccgcaggagtcgatcctgacacgttgatgaagaccacgcgttaaattcccgtcagctgcaatttcgtgggaaatcgctcgaagctcccggacgagtcgaatcacatagctcctgagaacgatcgagatcaaatattggaagtgacctgcgcctctttgcggaacgggatttcgcgcctcaattactgatattccaatctgtgccctgcaacgcacatcaagtgccacatggttatcgctcgtatcgagaaaaaacttccgctcctcatgcatcgagaattcgctgctgatctgtccgatggcatcagctgttagcgcaattgttgagtccctcagaaacggggacgtctaatctctgatcgatcgatgcacaccgactgcagaccagagaaaaaacgaggaattcaccgtgactttcgccacagaaatatcgggatgaaggaaatcatcgagaacgaatgccacgtgactatctgacgaccggacgatcggaacaaaccgacggacaaacgaactgagtaggtgagcggtcagccctcttgttcgtcgaagatctcaaatatttgaatgctgcgccactagacgtcggaagacggcacgaccgacttcggccgtgttccagaaaacttttcgagaattgttcatctctgccgagtatcatattctgtcgtcgttttttctacggaccgtatttcgctttaatttcgctgttgctgctcctgctgcttaatcgagcgttcggctccgtacggaatccatcagtcggacagagctcttggagcaggcactcagtcaatccacggtccaacccacatgagacgaacgaaagttgttgcgtattttccaagaagatgaacgaacattttcagaactttggctccgaggcgaaagctctcggcgcgaacggtctatagtacttcgccatatcccgaaaagtacgaccgagccagttgtttctcgtgcccggtggaagcgaaacgttccgattcgatcgttcaattcagagtgagggcgagaacacatgcccgaaaatgttccaccagaggtatcaactctgtacgagctcgtcaaagataacgggcagatcgaattcaggaagtggcgttgtctcagcacaaaccatcttcgagatccgggctgggtctctcagacgaagactctgagatcccagaatctacggcttcgagtgggaataacttttccacgtcgagagtaggcctcacttcgacgctcatggtggacttctgaagttccaacggtctgactcaggtaggagccatggccgtgactcggatagcacaacgggaaaaatgaaatcataaacgagaacgaagacagcatcatttagcggggacaagttcgtaatggtctcgagctaagaacacctttcagcggttgactgctcgtcggcatggcgcagaccctcttgtgctgatgctgaccccgatcccaggggtcaaattcgcaggagcgggaatccgaaatgttgatttgacttcctgggagctgacgacgacgtttccttcgttcgttggtttgacttcatcttcgacgttttcgtgtactattccgtttccatccggttcggctccgtgttgaatctggtcggaggcattcggaatgattcttcttcaaacgcattctcgaacatgaaagttcaactcttagaccacagagaactgttaggcgactctatgatccggttacgaaacgcggtgacgatgagaaactctcttctggtcgggtcagaattttttcccgcgacggacgtcagaattttcgaccgctcccgtgaggcgctcctcgaggcctgctcatccaagggattccacgtacctatagtcgtttttgcggaagtctccttttccgaaccgcttttcctctgtggtaaatctaactatttcgacgcacattgcacacgatattttcatatggtcaatggtctcacattgatcttagtatccggaagatcgttggcgcctggcagcgctttggaaaacgggcagaactgggggcagagtgccgccctgggaacattggcggcgtggaaagtgatgacttgtcaagcctccgctcgagaatattgggaattctgggagcttgagagttttgcttcgagtgatctaggcctgagcgctattgcgggtgatggaggaaggctcgaacgtttcgcttttggctggatttctcctcacggcgcttctcccgttaaacggagtcaactcaagtgaagtggagtgttcacatcgatgaaggctcctcgcgtgtcgtttaattcgcaaacagagagttccaagcgtcggtcggtggcggcggcagcagcaccagcaacgtgtgcctcatcatcggcgcgtttctcgagctctgattcaggcgcagtagacgacggtttcgaaaaggaaagttttcagaatcaatggaatgaaagtgtctcaggatccgcgatcgtttttcacgactttttcttcgatccaactctctctccccatccgtagagaccggtggcccgtctcgaaaactccccgactcaagcttgaaaagtcggattctcgaccttggttcaggaaggggccaatccaatggagttcgtgattgggtcttcctgagtcttctccgaaaaccgctcctgccggaattccgatgatcgatgatcaatgattcggcactgcggctcacgcgcataacgaaccctttccctgaaggcagaagttcccaaggaatgaacggtgatcgaaacgcggatagctcaatgaatatccacggagaatggaagtttaaatgacattatcgagcgcagaattgctccgtttccgattccgatgatgtttaaaatcgaggctgaaagaaaggttactcagacgtgcgagttcagggtcatagggaaacaagacgctcctgatagtctgcagtgtagcaatgtcgcttgtgaggacgctgttttttttgccggaggagtttcgaacggtctcgcggaatcacaactgatttccgtcgtggtggaggggatgaggaccgcgggattttcgttccgttcgtccgtccgtgtgttccgaagcaacaaagtcccgtaactcggacgacctgcaacaatctcaaaagcatcagccgttagttcgagtgtcagagagccctgattaggatggagagaaggacgtatgaaactgactgaaaatggtgcgatgctccggacggaaaagtgccgccgtgaacatcatctctcgtatacaaacggaacgagtcacgcgagcaatccgccggccagcgtcttattttttgtcgcacgaaagctccaaatgatgactgcgggagattttccacgacagccgctccgcggagggagagccactagctagtcaaggaagcaacatccaacggagcgagatactacttggactgaggcgatcgtctccgccacaagccgctcgcgtcgtgctcgcacgtgacggatcgccatcacattggatttcgtagatacgtagatttcgtagatacgtaaatttcgtagtaaacgtattcgtttgcggccttgaaattccgcggaccggaatacggaaaaccgggtcccgaaaatcaatcctgaacatcatgcaggagtagctggcgattgctcttcgcgcgaattcgtcatcagcttcttccatcgggggcggaagcgacccaagatgtggcgtcactccaaaaacgcctacatctgtcgcctccgaagtcgctgaattatgctccatccggtctcgatgcgggttcacgtcggtttctacgctactggcgtcgaagaatgcgcttgtgtctgtcggcgggcaaagtttgaaatctggaccttttgagtttgtctcgccgcctcctttctgaatgcttgtgtcaccacactaaaagctacaggacggcgcgttagtagggtcgttggtcggcgacatccggggctttcgctctttttcctcatcgtctcgttcaagagaggtgactgtgcccaacgagtctgaaaatttatgccagcaccgaccaaaagacgcggctactttttcgccccctcttctcgcttccccctttcggatcttacccagaagagaaaagatcaacgacgcgacgtttagcttgaccgagttccggtcggcctcctgggagggtggtcaacatggatgcggtttcgttcgagttgcgtcaaatctcgtcatcaaacaagacgagcacgggttcgcgatccgtgcaatcggaactgaaaggatctcccgcgagggttttgatattttgtcccgctcgttctgatggacttcgttcgagccactggtgcagaaggttggcagtagatgatcagcggttaggagaagtctgccaagttcgccgaccgttcagcctcataacgacgaccattaagctccgagagatgtcgctgttccgaattcggctgacgactttccgttggagcacgcgagagctcgcgattcaaacacgaacgcgtggtgtcacgtgtcagctcgcgtcttcttagcatcagactaacgattcaatcgttcagtctgcctggaacgagcaagaaggctagatttttccagcggttccagaccgtccccacgacattccacgacgaaattcttgacgctatccctacacgg

SEQ ID NO: 91 - DNA, 191897 bp, Phytoseiulus persimilis
  source 1..191897: mol_type = genomic DNA
  variation 857: allele = c; note = SNP_31
  variation 15689: allele = t; note = SNP_32
  variation 40135: allele = c; note = SNP_33
  variation 49492: allele = g; note = SNP_34
cttccccccgccatcccccatccgaggggattgcgcgaagcatcacagaaacgactctcagctcggtgggtagtggaacatctcgtgcgaggggaggacgcccgcatcatggggcgactcgctcgctgtcttgcacacgtcttctctgtcattgtggtgcacaggggcagaacgggggaagaacgcagggaggggggcgtctcagggcgcatgggttacggagcgagcaagccgtcgccagacagctttgcagggcaacatggactgttgtgtccatccgtgttgttaatctcaactgagttccttaattaatggttttctctgagagttgtagtggaagccgccgccacgacgaacaaaggaccgcgacacagaatgctctgaggagaaatgttcgtcggtcaatctacactccgtccagcttcgccaggcacgcaatccgcgtgatcgacgcgacagctcgcttgaactctcgcgcgcgttaggaaagcgaggtgacttagtctggctcccaagtatgatccgagaatctgtgaaaaaggcgtacaaaattaatccctcggaacatgcagtatcataaccgaagattccactcgggagtggccaccggctatgtgagcgacattgaagaattgtgttgcagtgtttgctctattcttctctcctccactgacgtagtcgatacggctgagacttgaaactcggcgaatcctacgaacggaattctgaaaatgctctcgtccatctggtccaacctctcggaagggaccggagaagaaggatacctcagctgcgcggctgccgatgcatccacccccgtgaagatgggtcaatattggaacaaactcccgttctccgaggagacaaactcgggacaactccagatactgcggatgaaaaccccgaactttcaggacacagacaaacactgtctattggttcaggaaaaactgcccctcctcttttcacccctcctttattttgccgatttccgtctcgtcggagggtcggtggatcgcgcgaggattcaacgcagccgagagacgtccattccgtcgatcagaccagcattctttttcgactggtgtcatgttcgtatcagtcgacaggagatgctgagctcggcgcgttgtttgaggatctcgagccatctgacagaatctcggatccccatcaatacgaaacacttcgatagatctgagcggcaaccgcattgagcggagagtatgggcggtgtccgatactcgatcagctcccggagtcaagttttacaatactggcccaagcgaaggcagccacggacggaataatacatctcaacgagttctgacagatggaaagggatgaaaccttcgacaacgcttcacggaaagcagatctgagacagctcctcaaatgtcgtacgcgtgtccgcctgcgtgagttttcatacgcaaatccatacgagagccatgcatgctgcgctccgtgcccatagcttgagcgccgcccgaaattcgaaggcactgtcggaacaattcgtattgataccgaacctacggtacaatcactctgataccgatccgtatgagtctgagcgggcggacccattatccgggtgagcggttcgcagtgcaatacatcgcgcgttcatgagccgaggtcgcaaagtatcagacgagaatctgcgctaccgactctcgggtgaattgaactccatcaaatcctctctccttctcgaggaaataaacgaacgcagaagttgagtggagcgaacgaagtagtgcacgcggtgcaaacgtcattttttgatgaattgctaaattctccggggcagaggcttccgcgttcgattgtgtatcggtgaagcggtgccgtgctcgaagctttgaatgcgtatcgaggtagttaattcgcttaagccgggtttaataagtgaacttcgctttccgtatcctggctcgaacggcccactctggaacttgacgcacttgcctgatcgtgtttgaggttgtctgagcacgcagctatctccccgtaactcgattcgatcaggaactcggagtcgtttattcgactcgtttccgaaccggagctggttagttcgtcgtagtttgttggctatatatacgttggcttcagaggtttgacgggacctctcaacctgctggacctcgctctaagagtgacgaggacggactgcccgattatctgaaggctgccaatatagcctcttcaacgggctgacaaaaatccaatgttcaagactcgtgaatctgataccagtttgcggcagcgtcaagatgaacctcgggatcgatcgctcctctctggttcacatggtcgaaatctgttcaagctcatactcacatatgaaggaagggatccacctcctgcagaaatggatggattgagcgagatttcgacaacactgcgttcgcgcgtccacagcatgttcgtcttcacagggacattatgaatacgtatggcgagtatcagggatggaatcgtttgagaagctccgaaatccatccgagcattccggaagaagcccctgtcgaggcgtgatgtgcttacccacctgaaacaccattcatggtttcgtgcacggtcgtcgtgcacgtgttgaattatccgcttggggaaccgtgcgcccgatcgcagctactcgggggaggacgtttcctcctgctccagagtcgagcatcacgtcagtattcgagtacagttgttccccgctcattcgcgcttcggtgctcacgacctcgcttattcgcggtttttgaaaatcgggacacatattctggagggacgaccgcagtcgctgggatccggctcgaagcttcaggatgcttgttttgattcagagtttccagagcaacgcagcaattcgcctcagaaactttgatagccatgcactgactcgaaaaagtgattaagcgtatcgcatttccggcttctgaagctcatagctcctcaacgaagaggcggatggtttcgcacgagatcgtatcgttaaggtggactctctcggtgtagaaaagagagaaacattgctcctgattgtgttctacaagcatctgaggccgagcggtgtgacactagaacgtctcgcggaaaccatcagaatagcatcgcggagacccggatctgctccgtagctccagttcatggaaggagactccactgggggagacatcagagctgtcctatctcaaaatggggcgttctccagaatgagatatcgcgaaacggtgaaccaaaacgaaaattcgctattcgcggaatgtctcgaaatcaattagtcgcgaatgacgaggaacgactgtagttccgattggagaaattgcttcgatgtgattccggcaccttgtcgcggggagcgagtaacccccgatgcgaggagtcaaaaagtgggtctggaagaaggcaagtctgaagaagcaagagggcaaccgagcagttcgcggcggctagctgatttgtcaacgaccgggatattgagaccctcgagagcttgcggatgacgagggtattggctccagtcataatattttttctgcgcaaactttataaacatcgttgacgccacgatgctcagcttagcatggcgagaaagtttggctctgaagagagagttctaggagattccgcccaagtgagcccaaactcgatccgagtatagccgtacgaggagcgggatctctcatgcattcgccgttcccaattaaagaaatggacacgtggaatctcgcacaaacggttctcattcgtgattccgttatcgggtattgtgagttcaagcaaacagttctggtctgccagaactgaccccgatcgagcgccgtttcttcagtgaagttttcttaaccccctgcctgcgatgttttcgttgtgagttcgtggtgacggggttcaagagtcacgggttgatttttcgagctcggcgatttcataaataacaagaccggagcgaggcagggaggaaagcgctgccaagcagttggccgggcccagctcgctgctgcttgagattgtttttctttaattaatctttgttatctttgtcatatagtaatctctgtaatgagaaactgtaattattcgtccgctcttcaagttttccacgaggataacgctcatgactacgattacgacgacgatgataatgatgacgatgagaagaaataaaaactaaacaaaaggagccgggaacagatgcagcggaacgacacagacgcggccggtaggatcgcgatgtcggaatgcgtgcgtgtcggaaataggatgtatcgacccgcgatcgtatcgtccaatcagggatcatgaattatcgacgacgataaatttaccccgcatcgagctctgccgccgactgtgcacgtgtttagttgggagtcggtgcgcgtccttcagggtggaaatccatcgatcgggtcccaaattgggaggatctccgcccccccccctcccttcttccatttttcgcctcgcacccatcccaccggagcctcacggtgaggatgtcggggaatcgctgtgtagatttttgacgattccagacacgagtcgagccatcgactcgggacgaagcactcagggcaagaatggaagctcgtgagtgagacaggagtagatacaaagttatactaccggacgctgcacacgtcgcggtctctgtcgaatggccgtccacggctctgaccaccctccggcatggtggagccttggtggtcccaatattcggccacaacgagcaaaaacgaacacgatcggattcgtgaccgcagctagggcattcgtgactcttgctgcgacaaaaccgcggggaacgttggacatgagagagtacgtggatcacgcagctcagtctgttacccacggtgcagtaaaatcctcgggagattgatctagctcaacgtgcttcgatcctttgacccacagagagacaacatacgagttccgaccgaatggccgggagcccccacgaaacgtttccacacaaggagcgcgttctcctgtgtacaaatacttcgaggaatgcgtattccatcatattcaacaatggatatttggtctcctccacgggctccttgtgacacggacgcgagagagagagatttgcgcgtgcgcagctcccacgagatcctcggcaccgatgccttgttctcctcatctctttgcggaactcgtgtccaaatgattctgagctgttcagaaagatttagtcgatcccggttctcgcttggcgcccggctgctgcggtggttgccgggcttactcgctgagcggcttgcttcgcttgctctactcagaagccacttctacatcgctccgggcttataatacgtttaccgggagacggggtagccggcggtaatagcctgcggatattgcgttgggccggcgtcggtaactgaccgaccgaccgggcggccggacggcaagtcggtcagtcgtcggccggcttgcttacttggccgtcgctttctttcctcttcaacttgcctcggtgagctctgccacggtcgagcaaccgagaagctcgtcgccgacgactcttgcttagcacagtgtccctaattacaattaatagcggactttgccgttcatcatgaacgctccggctcatctaactggctaactgaccacccgtccgtccgttcgaacaaacgaacgtccgtttgcacgccctcacagccagactcagcaactacgcgattcccgatttctgcctcacggtctcgatccatctctccctggacccgaattccaaatcgtacagggttcgagctgggccggagcgtcggctcgtttcgattcgaaactcaatcgcgcagccttcgcgggtgaacattcacgaatgcaaatccatccaaaccaacaagttgattgaaactcatacatatgaatgaattcttcagcactacgctcgccgccccaaaaacatcgctcccctgcatgcgtccttccccccttcgccggctattgtcccgcgtaagtccccactcggatgtcccttatggaggtacccagtgccgttacagcctctgctcccgggcggcgttcctccgttgtgtccccgctccctgccaccgccattcctaattactcgcaattcaagctcctatcaaaaccttgcctgttagggccccgtcaactccgccacgagctgctcccacttgaggtggtcgcattacgacatcccaacgaccgaacataaacatccgagcggttctgaccgcagttacaaacactgctgttatcggttcgggtttcgcgggagcccccacatctccggcccagagtaccattgacaactcggactcttccaggacactgactcgtgtggctgagcggacagtgtatcctttcgatcagctcgtcatcgcgacccaatttgttagagttcgcgagcgttgcatgacacacggctaacaacgaaaacaacaccgggttgacggggcgggcccgcgtggtacactcgtcgggcttcagattgactcgaggtggaattaatagattaagcctttacagagctcgtcagatattcgctcgctgacgagcaagtttgtcgctgcagagctgcacactggagcggaatcgccctgagcgagctgtaataatctaatgtagtgagtccgcgcgagcatccgttcgaccggcgttgttgttgtcgggatgaagaggaggactcgcgggcgagcaggacgccatctagcagccaggggaacaaggatcgaccagaaggactccgccagcgatggagcacgctttcacgcatcgtgatcaatgctaggaggctagatcgggatagaagagctctttcaactgcagcgcacgactggtccttacacggtcatccaaacgtggcatgaacgggggcggctctatcgggagctccttcaaggctggcatactgcgtaagagtcggccgcagatctctctcttctattaatagatctcaggctgcatctgcggacgacgttccgagctcagtgtatattcctcgagcggatccccccggtcggagtccatctcttgccggatcggttagacaacaaccggaaaaaacatcctgcgatccgagcggccctcctcctgatggcgacacgcttcatggagcgctcgtgaagttcggggatgcctttgctcccgctctaaatcatgaagtgcaattcattcgtcagcagcttgcatgaggcgggagcgcattcctcgggcatgacgcaacgaaaacaacaacaacaccgaagcggaacatcgagagattgatgggaaattcggatcaacgcctggcggcccagcaacggcgagcaaccaaagacttatcatgctctcagcaatcggctgattggaatttgcaatttaaatcccgccagttctcgagctgctaacgaacgccgcgcctcgggcacttccatgacgattccttaagaacacttcaatactacaaaggctcgagaattttgttttcggcccgaagtcaggaggaaaacggatttgagaacggtctgagaaatgggtccggaggagccgtaatcaggttgtggaggggcttggcgagacccgccgggatggtccctggaaggacgactagggaagcgcgatccgagcggaaaaggaaaacgagggaaggaattcgaacgagggaggtcggagggaaggcacggtctggaagagaagccttcccgggttgatgggcgactggctggctggctggctaaagcaaacaagagactgcgtcgatccatcaggtttaatgaagtgataaaaatatattccgacacccttgcttctgcactactgctgatgtcgcctccagcgtacgtcgccagcttccctgtcgtcgtcgggccaaacttgaacgagactcggttgcgcgccacagtttattgaatttatccgccgaccacagcaggttctgcccccgggcttcttcgtgaaccagctgggccgagctacaactttacgaacccgacccggaacaccaattttctggcctcgcatacgcggtgcggcggttcctcgcagacttgctcgagataggcagcaccttgcccgtcatgaatctcacgaggaaacagattcaaggagcgactccacctttcaaagttcctgagcggttccaatctcgccggatgccgtattgtttgcgttcgaattttcggagatgttttcgagactcaccttcgttacttccgatagagtcacgtcgctcccttcgttcgaacatcttacttctccccagggagcgtcttctttccggtcctcttccccagattgccgagcatcctgaactgttaatcggattcgagcaacatccagtctcagtttgcgcgcaggggaattatgaaatgagacgcctgtcgcatcgctgcaatgagtttggccggactcagaaacgttgttgttgtcgtcagagtgaaccgagctctttctctcgtcctcgaaacccgagaccttttgtacgactcgattttgtggttgacgcggtcgccgatcatgttcggtgctcctctcccaatagggtcggagccttggcaatttcggaacgtcacagctatcgatgctttgttcgcttccgagctcttcgctccattcaagccgaatcaactccgcagaagtggttgacgtgtgcgcgagtattcgacgcaacaaaacttcttcgagcgatccgctcggaggaaaacagaactttgcgggatgtctccattcactggagcgttcaatccagagttcggataccctagcgattgttgccgattcctcctcatccaatcgaaggaaggcagaaaacaattcactcgtgcgcgcctttcattctttccgaggcccctgccaacgaatctgagtgaggcgcgtgattgcttcacaacttcgttcgcagtctatccgcgcatggattcgccggtgcaggtgtagtagtcagcgctgtttactgcaagtgttgttctctggcgggctgtagcggcggttgtcagcggcgatgttgttatgtaggcagtcactgcagcctattcgctgcgcttctttcttctcgttccgtaaacgacaagccaacctccgtttactcttgctaaattattaatgcttacgaccgagggatgggcgaacgggcgcacgagaccagacagccaagcccgcggctccatcgccctcgacagcaacaacgacgacgacaacatggatccccgaaacgctcggagatgcccgttgcggagggtcagcaatttaacacggttctgcaatcgttccacgccgtgctctcgcagttttttcgtcatggtaacgatatcactcgtcgtccaaggactccctctcttttaacacgatgcgagattccaacacacgtggcaaggaggagtaaacagcgccaaccgaccaaagatcgcctggaggttgtgcatgccagcaatccattgatgaatgtcgttgattagcggataatggggagaaactcggatgcgagaagtctggaaagacagcgattagcgactagccttgaaatatcgcactcctcgttgtcgttcctactgagttctaacgtagcctagccatagacttcggaggaggttctgctctcgatcggcagacgaaccgatggcactcgatgccatattcggcggagagccccaccttaagtattcggcgattccgtccgttgctagtcagaaggagagaaataacacgcgatgaatataacgtcttcagcctgggttggaactgatgatcgcaatgggccgattcaaccgggaatcatgacctgcaagcccgagctacagctcgcgtttcttctctcctcgtcgttttcttgcgaagtccacaaactccttcgtccgctcctggatatccaactatccaggcctcgaacttcatccacgctattcgaaatccccgggaacgcgagttgagctttatgaaagagactagctgaggagagcgtctgtagtttgatatcatcactgcgaaccccaccgaatgcgttcaccgtaccggggttttcgttcaagcgagacacttttgccatgcttcctcgggcgacccagcgagagctagcgaaagccggttcaatgtaccgagaactccgcagtgacagtcttccacatagtgagattttactcaattgtgttcaattctattctgatcgaggcgggcggccatatccggaagtcgcaccgagcggcacctcgggaacaactccttccgatcagctctgcgtcgcggacgctcgcgttcgtttctccctcaaacactccattcgatacaaagccgcaggaagtcgtggggtgtcgtggagtgctcataaacagacctcaagattcggcgttctcttcattgtcggtgacctccactggtttggtgcaacgatcgatcaggaatcacatcgtcgaaatcggggcacaggccgtagatgacgcaatggctgaagaggagcaatcgaggctccgatatcgcccaggccaactgaatggtgccctaataaagtggacccgacgtcacaaggagagcaagcgggagcgaagagattcagcaagagagtgaaggccattacgccgcactaatgattgcggatcttaggcgccgaatatgaagtggactcccatgtaaatgaggtctactgcatactcaccgagcagccgtgctggcagctcgacaacccgcagtcggcccatcgtgggccaaggtaataagaagaaataagaagggaggaggaaagaggtcgtccgaaagaatcacctggggattcgtttctccggctccgctgatttaagagccggccgctcgcttcattctcgaggaaatcactctaatcgatgagaaaatctcagcgcatcatgaatgtcagcctacgatgaagaggacatggcatacacccacgaacccggggcgttcccgaggaaagactccactctatgtatccgagccttcgaacctcctgctgtaatagcttcgccgagaacgtcctcgtcgaccggaaaaccccaggaactctcactgtgctcgacgcccgggatgctgacaaggagatttagggactgcagtaagtttcgaagtttcttggggggcgcaaaaggaatcacgacattttccccgaaatgtgtttttccccctgtaacctcgatgttctccatcgagtatttggacgaatcaaacgaatagtcatcgtgccaactgtccaaagttgtgaatgtgaatctcctcagctgattacatgcttcgaatcgaatcatgcctcagccagtcacggtgcccatccaatgtgacattcagcgagttaacaggagatttcggttttcggaacattcggagaccggttggaaacacggatggaaactgtcggctcggagagcatcggctttctgatgcccagtcgagaaggaggagcggcggcggcagtgagagaggggaaaagtgaaagtactcggaggactcgttgttattcgcgcatagcgggcccgggccgaggacctatgtttgcggaaaggatttttcatgctcgctcctgtgtgcagcaggctctgcagattttgcgactcagtattacgctgtacttttgaaggatgatggtgtttaaaaacgcagggacgacttccaagtgccagcttcgacgacgccgtctcaaatggaacgtttcgatcgatcgcgctgttaccaaacacactttcagctcccttgcgcactccaccactcagtcagtgttctccacattgaagccgttgttgcgcacacggcaagagtgcacagcgtttgaatcaagccgaatgtggagtaccccattttctatcgattcccgcttcgtcgttttcctggaaaagtcccacgcacgcgaacactgcgagtacgtcggaagttttcgaatgaatccgatgcttcatgggcaaagtcatgtaggaggacagggaactcggagctccttgtccttgacgtcgcgtcgtttgtcaaagggcttccctgccgtagccagtctgggtcttgtggagaagtttgttccaggtgtgcttgccttggaacatcgcaggaagttatttatcgcgttcggctccaagcgagaactctcggagacggccgaagaactctgttccgattccgaatacgactcatccctgcggatctatctcgatattcccggaacgagctcgctggtgggaggggtccgggagcactccttgaagcttttcttccattacttggctcgaattagttagcacccgaggagtttctcagcaattcggaagtcgctgttcgtgtgtggtgactgggtgaaccattagcgtgggaccggtagcgtgccgtgttccacctcaaggacacggcggagcgattttaattgcagttgcgcggagtgtttgcgcgatgacaaatgcgtcgagctgcagatgatgcttaaatcacgagaccacttgggtgggtattagtcgactttctccgagtgcttcggtcgagtgggttccgttctctgcgtcgtcaccttcgtctcctacttcccagacgtcgtcctcatcgatgctctctcgacgtggaatcctcgtgcttcgtcgattctgtcgtgaactgtaattagacggtgccattcagagacgccgggtgacttattgaatttttctgctcccgtttcctcctctccatcccgagatgctcaccttctgaacaggggaaatcgagagatcgaagctcttttctgttaagtctcgctattgtgtcctcgaggagcgctctttgaagcataacggaggtgggggaaaatgtcgcgggaggatgttttcgctgcaggaatctccggtttcgcccgtcaaaaccgccagtcagtcactgagcacggaagcatcgatggcggctgcttcgacacggagatgaaccacggagctccagaaggactcgagggcctgatcggagggcgtgtgggccatttggagctcgagcgagaggaaaacgcgagaaaacacggaactgaaaaagaagcgcgagggaagccggggaatcaagaggaacgctcgcaaattcgtcgggcacgacgatctcgcgcgatttttcctttgaagtctcgactgctttcggctcgcggactgtgctccgccggctgcgtttgattcatcgtcgtcggcagagtccggctgcgcggggcccgagttcatgtcccttaaaacgctggtcctacaaagctcgctgagacggatccggaggtggctggatcccgttgggaacggctcccgaccgccgcggtaccgggaacgttgattcgtcccagcgttctccgctcattccgaatcgctcgttcactcctgtttgttcctcattccccgggcgatgagtatatttgcgaattagggtacttcatcgctcctaccgaatcaagcacgagggttccacgtcccgatcggatgaaagaaaattcgagacgctgcctgctcattgaatagccgttgcgctggatatttgctcgggagtttcccgttaggagagcaccgtttcatccccgcgagtaatcaactttcgtttccaaacgtcaacaaccgcgttcccggccggagtcgtgaacggcctcgacatccgcatatagagccttgccgtataacggattactcgcaatagtcgcgtgacctccttggacagaagttcatacgcggtcagagtgcgctccgacttacgtgccatacttccatgctgattccgcgcggtgagcgttcgttggacgagaggctggaaaccacgagcacacggtcggaactatcaaagggaaggcactcgctctgtaaacaaagagttgggagcccgaacataccgagaagggaaaaccgtgcaaaaagcgaaatgaagggcaacgcagctcgttagttgcaattacccatgttcgctgcttaactgttatgatgggaacgagaagaaacaaacaaacaaacaaacagtgcgagggcgaacgcgagcgcaacggagtctgttgaacgagcgagctgggagcgggcaagctgacatgctttcttccttatcccataacaagccatatcggcgacttagtcgttacatatcttaatgagctcggccagacgccaaacacagggaggaaggaggagccactatgatataggcacggatagaccctacgagggagaaagttatgtcaacatcgataaatacctcttcgtgatatgaggaagactacagcaaaccgccgtcgtcagcgactactagatgatcgaagcggaggagacggatggaagccttggccgccagctagcctatcgcgtctcgttccccttgtgactaggagcgtcctcctcctcactgtgagcggccccgaggaatcgggtgtgctggacagagcttgagacgaaaagcatcaaccaggccgtccacgaatgtcagcgactgtgtcacgtggacctgcgataaaatagtaaggaacatcggcgcggctttgtgcttcagagatccgcacgggcgtaaggtgttgccaagctcgagaagtcctgttccaattcctcctccaggacggacagtatacataacggtctgacttcgaccccaccgaatagtgcgcgcaacggttcacgaggcccgagggcgaagaaggaggcgcgagggagagatctccattgtcattgttctttggagagaacaatcccaggggatgtcgaagaggaggttctctccaattttcctcccgtttgagcttggagatctcccaaatgagtaatgggcgtcctgcatacacgctcaacggttctttggggggttcgatgattttctctgcgtctccgatggaaaattcgaccgaactcatcaaagccgctcagtcctcgtgacccactgggagggacgctaccattctcaagttcaagcgatttgaagcgcttctcttcggaactcggtcgcggaggaacccgtcgcagcgaaagtttcgatgaaacgaaccagttccgctcgtcctgtcggtcggctctcgcttacaaacgaaacttcggtgcgtagagcgaaatcgtggatttggttcgttacaacgagttctcccgaaaattcgcactggaaaacaatggccttgacccgaatcgcagggtgcgatcggagaatcatcggatggatctcattcgaccctgtatcagctctgaaatcacgaaactcacacggggaatatccgaaacggacttggaggcgtagtcattcgaccggaacaagtctccagcgggttgcagcggccgtcggagcgctcgctcctctctgtctttgctcgcgcaggtggttccggagcgcctcgcgcacatccgacccgaggctacagggtttcattttccctgacaaatcgttgaagtagcttgaaaaattactcattggaaatcgttcgacacgacgctatcaggccagtcatcgcattccaccgccagcgcattctccgccgacgttcatatatcgctccgcggtggatttcgagcaaaaattcccgcagtggatgcgggggagcgagttttgcgagtgagaaacggagacggtatcgatcaccgctcgcactgaaatccgcctcgaggcgatcgtgaatggaatcacgtgcaatgttcacaaaagatgactccatagcataactgaccagccgcacagcggagcattcccgacatcggaccttagactacaacgatggatggatttctggccccatggctggttttagtggtgcgcgtctgttgtccccgccagacaaaggattgcttgctcggtttgctatgcatcggccctgaatcgcccattgtgattctaccttcaataaggggccgtggcggtgcgcgcgttcctctttgaggattcgggtgacccgagctgctagccctatccgaacgcacaatatcgcagagcaacgcttaagaacaccggaatgcgctctgcgtttttggctccgacccaatagcgatcgattcgcggttcaatcgatcggaatatcgctcccactttgaggagagttaaatacaaagtgatggagtttgtatcgttgaggaaacggcaatggctgatgacaatgatcacaaaccattcgtcaggagagagcgatttcatcccgattgagttgagaacgcggcttcagacttgacgtcttggagaaattctcgcttcctccctccctcccattgatatgagccgagtaggaggggcaggggggggggaaaatcttgggaaaggattccctgataccaagcagtgcccccgctctcgatcatccgtgagaatcggactatttatggtacaaaaattggggaactatccgaacactttcctcataaatacctggtctagtggcgacactaacgtctgggaacggacggacttcctgcgtgtctgtcgttccgcccgccggtcgctcggtcgagggtttgtctgtttggtcggtttcgaaggtcctgcatggcctgccggaccgctttgcataaaaacaagccaatttatcggcgtgatgtctgagcgcgcttgcagcactgcgccacgagatttgtgctgcgtggttcgagacggtgcggaccaaacagtgcccgcctcatcctcatatttcgtgatcgtcgctgtcgtaggggttgttgttccgcgataggcgtacggctctcctaatctcggctgttttacgactgtatgctggcgttccttgggcgtgtggtttcgatcagtcgcgattccaagcgtcggttgaccgagtctagcagctcctccgattaaaactgacctccctccgtggggattggtcacggggcacaacaacaaacccgtaatcagtaccaatcgaagtgtctcatcttcaaacttcccagttgatgccgatcgaatcggtcatccgaatgttctgagatgtttggttgggtcagatccttcgcgacccaccttccccgatcacatcacgtcacggaatcttttctccctgggctatgttggcgctcattcccgagtgatttgcccgactgacgacctcagttccttcactctgcgtctcgtgtttctttctgtcggaaggtaggtatgttcgttcgtttgtttgtttgtcagtcactccgcacggggcgggggggggggggctgactgtgnnnnnnnnnnnnnnnnnnnnnnnnnnnnnnnnnnnnnnnnnnnnnnnnnnnnnnnnnnnnnnnnnnnnnnnnnnnnnnnnnnnnnnnnnnnnnatctgggtagtggtagagctcacccgcctgcctggcctgctgggtgagccagcaggcctgcattggagggaagagagggggaagggggccgtcggggaagggccacgcgggcgaggggaggcgaaaggatccgcggagagggcacacaacaaggcccctgccccgcgtaagatctgcgaatcattcgaagttgttcttccagagagatacgtgctgaccatcagcggtgttgttccgacccgctctcgagccgaagctgatcagccagccggctggctctaaccccaaacgaacatttcatccggcgggagatgctctgagcattttttcgtgttcccctcattgacaaggtgagttcactctggtgtccggagtccgagaggtctcggccgtctcggaaatttcgccgccctgataatttttaaggatctctctcacgaccctggttccagcagcttgtgctttgaatatttttcgcgcgtcgacccactgccgtcatgcggattagccgagaagcacgttgcgttcccaaccctcccctgttgtcgatgaaataacctgcccggagtctagctgcaaggtgttttcccgcggaagaccacgtggctgtctcccccttacctgctctttccaccgtgtgttgctcgtccatgttgtgaatattccctactttctatcggattaccctcctgctgtgtgacttcgttccaaccccacccgagtccgaatccaacggataccatgccgtactcaagtgttcctcctctacatctgcgccacccccagcggccagcgtagctagtgtgaagccaccgtttaagcgattggtcgtcctctcatcaacggccacgccatgaagtgtccaagtctcatgggtgaggactcgccgtccaactcggagtacgaatcgccgcggcttcaggcctcccagtcctgactgatcaagtgaaccgctaacggaagggacgtcggacctaccgttgactcgagaacgcgggcgactccaaactcaccctgaccgacggcctcccacccaccagcgggtcctcgtccgacccgagtgtttctgctcagtgatttgttctctgtgtgcgcgcgtgccttaatcctgtggctttaagtgttccttgtcctgcatcctgaaccaaaccatgtctccctgcccgctcctagccttcgtctccttcagggtaggtactcacaaaatatcacttcttgccctctcaagcacaatctgtttacttaaggccgtagttatcgaattatattcagccgagagcgcacttgagtcacgggggcctctctaaatgaacgcggtcgaggctctcggacgaacgaagtttcgtgacgaacgatcaaacaacttttcttatgaatcctcgctggaatccctgccggaactctcccgcgcaggcttcccgtcgagcggcccccttcgaggaatcccgcccggttcatgctcacttgaacccttgctccgattcactcgagccacgttcagaggctccggaggggaaaagtcgagcaggagtccacgacacaactttctttgaaacttggccgagaccgatgcagaagtctattctccgcggctacaatagcgccgatccaaacaaagacgagcaaacatgttctataccgatccggtcgatggagtcgaacgcggacgacaactcaatggaacgccatacttagcatcggatgaagtaacaacgctcaggagctcagggctgagccagaaggagaacgccgcaacaaaccgagcctgctgcgcatcccccggatgacggtcgattcctcgtctgatgagttccgggggagccccgccggtagccgatatttgtgctctcgtttgaactctctcttccgtcgattcgcctctgcagtgttcagctctcatccggaactgctgtccgtcacccccctcgcggtccctcttcgatgcccgcgtcgcacgacccattatgtagatgacggccaggccggctctacaactgaaatttatctccgtctgttggctccccccccccccggtcgctcagtgcgctcgttcttccgtctgacggaccgaaactctccgagccaacaaggatcaactcgacgtaatctgacgccgcggcgggcaaagtatcgtcaactagggagaaatctgagctcgactcaagagacatcttctaacttggcaatagacagccgcacagtcggtcgagtgccgccgcacatgcgacgctcgctcccgagctaactgagtaacgttttgaagtgtttcaaaactatttgaagttttgagctccgatgtcgttgtaaacgttcacttagtttcttgtttgttcgccgtcgggaaccgggagcggaggaatggcgagagcgtcgtgcctgacatcggaccttttttttcaacaaaaaaagaaaccttggacgcccgagaaacgatggttgcgcgcagtaggtccccggctcgcgctgcgtagaactttcggctccctcgctggtccgggggactctgttcccaggcctcggagaattcatgtagctcaggagcaaaagccgcgcagaagtttgacaccgccgcattaggccaagttgtgaaaacttgattcccggcccttcttcacggaggctgggacgatggcaacgatggagccgccacaatgcgccacggaaactcatattcatcacttctgggctttgaaatgtgaggaccgcgaactcgtttggctcggcgaagttgaaaagtccgcggcgctcgcaatatgaactcggggtgaatgcgtctcggggaagcctctacggaggcacttctcggagtcgctgaggagttttgcgcgcgtgcgggagctcgtgccctccgacgttgtagactcggttccgttccaatatgcggccattgggatcccgtggctggaaatctttggatctcaaacagagtaagaccgaaagctccgagatcctcgtaggcctggcgggactctcgtcgaggggtccgcgtctccggtattgacaatgccggttcgactggctcactgatctgcaaacgtgggattgttggagtaaacagtcgctccccctcgggactttcttaacgtactctggggtgcttaggtacacagaacgcgtcgtcaacgtttgtggcgctccgatgaacccgagcaaaaacctcatactttcgggtcgaacgcaccgttgggatccgccgtgtgaattccagccgctcgggtcccagacaacctcttcccccaacctcgtccgacaggtgctcgtctcgttgtttggtctgggtgagtcggtcgtttccctgtgcctcctctctgatccctgatccaatcgctgggtaactgacagcccggggagcaaatagaccgcacggtcgccgcagaactaattgcactgaccccgaaacaagctccgctcttcctcgtcgaagttgttgctcacggtgattttccttgagagcttcgagagacattcccgtgctatctcgaagttcgagcgagtgaagttctctccgcgaccgcgagtatcggagaggacgattcctcgcgaaaaaaggatctgctcgaacgatgtcctccggtataaccggatttcggtttcgagcccaactggaatcacggcggactcacccaaattagcacccgctgcatttaactcggaaagcttgctccagcacagcgagagctctgcatttagtgcgtccattgttggaagagatcgctttttagtcgcaaccgctgcagtcgccattatcgacatcggcggccgaagtgggctagacgcggcgcgttcgtgggttccccgatcggcttccaatgtccccaaggaagcagttgagcgactagtggcggaaaagcgcccagcgtcggctggctcgtggaatcgagtgaccctgaggacctgggcagcatcggtgtgaggcgtcattccggtttaacgaatgaaacgaatcccatcgagctggtcctcacgccccatcgctgaattcaggaaaggcagcgaacggtttcgaccggagacaccccggtttatcgcgcactgcgaacgttttgcgagtcacgtggagatagatcaggggtctcgatccattttttccgagtcatgagttagttctcgtgtatgtagactatgagcgtctgtcgggctggggccaacggtgaccactttcctcggaactgtgaacggtccgcttagcttggtcacccctgggatcgcatgatcgctggtgggcagggatcgcaggcggcggagatcgacgtgtatgaggacacccggtaacatgaatcattctgcgaaccccgtcctgtgatcccatggaccctcgcgagattcctcgaaaggtgccagctcgttctcgcgtgctgctgcacgttgcgaacgctcgccagtgacccaaaagcgaaagctcaggattgcttgaaggaggccctggaggttcctcatccatgggactcaaagaaccgtatcccgtcgaatagttcgcaagagatccgtgcaggctgtcggattggagtgggtctcaaacgaggcgtgaatgttaaaatctttcgaaaactctgaaaagcttcaaatgattccgggaggtagaagtaattcccggcagggcttaggtttcaagttcctcgccgccgctctcatattttcaatcccgctgagtgttgtcttcgcctctgcttcgtgctgataacgtattgcaacaatcacatcggcgcttgccatggggtgatggtatttgagccacagtgggtacagcggcagcggcagtgctgacggaacaggagcaagaatggattcttcggatcgagatggctttccaggaggatgcgccgcgttctgattccggaaaggtgcgaataacctagtctcaacggggttcatgtcaacacgttcgccttcaattgtgcgaagcggtggcctgtcggcgaatgtactccaagagtttgtagcttcttgaggcgaaggagaggaagacgggagagaacgagcaggtggccgtcgacgatctgcagaacagctgcaacttgtcctctagcggttctctgacgtcggcccaaagacgttcgaacagcaacagcggcaacagcatcacatcaatgagagctcggctgtaaaaccgttcgagttcaaaaacttcccactagcggatcgcaatcctcgccaacggtggccgatgctcggctcactttcttgttttgggcccggtgagatccgaatctgggagccgtttgggagtggacgcattcgtgacgaggcgtctccaagttctccttcgtgggtcgaagttcacggctgccggaggagaaccggtcgctagctgtgaatcgagcgagcgggaagccagcgaacggagggatttcgggcgctacgagctgcaaaagcaccgcagccgctcggtgggccagcatgacgcggcgaaatgattcggtgatcccaggttagactgttcgttcgtccgttctgatctgtgttacgtgccttgcgtcccaacgagtctcggctcggcggaggaggcttcatatcaaggagaacaaagacaaagacctccgcggatccggtgctctacggtgctgccgcgaaagatgactgaagctcaggcacactgtattgcgtcgacctaatgaagggtatatatgcatgagactcccatgtgataaacaggagaaacgcccgcacgagccgctgcttcaactctgatgcatctctcattgggctcttatctagcggaagtctggaaaagtccttcaagaggccatgattctcagccctctatctcgactcgtcgatgctcgtccaccgattcacagcagcattcaatcacagcccgcctcgctccccggaacctagccggcttctataccgaacgcgcgcggaactcagtcgccagatgcgcgtggtcttggtgatatgtctcgtttgacacctgacttcctcaggaacgcgccgtggaggggcggggactttcgtcgagttaactgcataacagtaaacaaagctcgtggatgtctcccagcaagcattaacccccggaggcgcggttcgagagttgcttcattcgcgtcggaacagtccggatcattcccggctatcacactatctactgcaagagttcagttctatcaatctgtcgttagttccgctagttgcgcatggagctaaatcactccgctctcgaaacgattcgcttcgtcggaagctcccgtcgcgacccgctctccgccagccgagcggggcttcccgattccggccgcgaagacttcggccgactcttgcccttggaggaatattctccgagcagagatcatcaacgacgacgacaagaaagcacgtcaacgacagggcgacggtttcgtgatacacttcattgttgtcaggagaagaaggtcctgggttcaggacgtgcgattcaaggccgaggaagggctgtctgttgaataccacgaaccgaggaattccgggtcgacgtcagttcgaagctcgtaacccccccggtggctccgggtgtggactcttcagatgagatctagacacagtggaggaatctgaatgaggtgttcgactgtgtgcagagacggatatttgctttggacgattaggaaagaatcagagacttgcgaaaggtctcctcggggtccgactcgcgaacaggagaacgggtgcgactcgagcacgggaaaaaagtcaagagctcagccagtcgaaagtcaaaagagcggaggcgacgaagcgaaattcaggagaggcgaattgagttttcgagagttcacatctgctaggagacagaagttttcgaatacgacggattcgtgatcgttccgagacttcagctgatgctccgcttctcttcgggttaattctccgggaggctcgctgatgccgccgtcggcgcggccggattccggttccgaaaaggaaatgaacgtttcaacgagggctgccgccgtgcgggccagatcctgggactgcttcgctgctttggggaaaacagcaccggcacggaatgcggggaaatcggcgaacgaaataatagcgagatcctgtggggaagcggaggctctttagcctctggtgtcgtcttcgagatttccgaatccaataattacagtcgtcgagttggcccgtttgcttcctcttctgccctcgccgtcgtggccgccttcgatggcagacctgcgagcggtggaaacctgcgttggagcattgcttctttcctcgtagcgaatcctcgactcgatgggcaattcgtcccctggttcctacatccatgcgtcgtcattccgttgcttccccgcttcaattaggcgaaaggaatcatatgagcctcggatacgagatatttccgcaaattcattccgcctaataagaactctcgtcttctgaaatgagagcgatcgatggagagtccaagcctttgcttctaagagtgagcctgctttgagatccagacgaattcatgggattgtggctcggtgaggtcgtgatagcagttttcatgaaagaaaaatgccgttcagtcggctcggaaccccgaattgacacaatcggcctcaggaagtgcaccgggcatcccgaattcggtacatgataataattgtgcccatgaagatgccagcatacgatcaccatgagaaaaatacgacacggggatcgagaccgcaacgtcactggttaggtacggttggcaggcagcagcctcgaccagtctgacatcttaccgtcgatttgaagtcgattgcgaaacgctctttcgatgaatcgcgataaccaaagagacgtcatcgtcactcagagtcgaccaatcgaatctccgtcggtgtttctgggggagaatgagcggaaccagcagagagcatcactccctcgagcgacctctttcagtggttactcaggccgcaatgtggttttcctctctcccatctccaccaagtccagctcgacgacccgcgtgcatttcggccgtgttacaaaaatgccattccggagttctcatctgtttcaaacgcctcagtttctcgagcggatattcttcgggcttgtgtcggcggtagatggcctgaggccgacccgctttgggttattgaacccccgcgtcacgccgtggagaagctccttgcgcgtgttggacgaatgcgttccgaggaactgtcttgtggtgttcaaaaaccccccgcgggaagaatgtgaatgaatgtctcgggatcactccgcggtcagagttgggaaaaatccgcccagggaaacggttttgattaacatgaaagaaggcgaaaggtgcgtgccattttttcgcgggagcgtacttcatctagcgacggactagactcacaagatcgcgccgccagcgccacagataccattatttctaatgattcaggccgacatgctaacattgtttgtcctcttccaggtaagcactaaaaactttactgcggctttgcacgggtacacagcgacgtctttgccagctttctcgcagctcactcgtggtagtgtttgagtgtcccccggagctcgaaggttcgttgctcgtttccaggtgagccccatccagtggggatgttagtctactccagttggacttgagaggggggcggagcgaggagtttcggaaggattcagacgaatccttaatttgaacgattcccccggaacgtcgctctcggagcaagttcgagtatttcccgatgcagacggtgaccgccgttcccagtttaccagaagagcgctggagcgcgtttcgttaccacaactcgcttcccgccacaactcatggctctacgtcgttgttccccgtttcgtagctgattgtggaaacagcgacgagtcgattctggagcagcgtgctgagccatgcggaatccgagcgacacttcaacacttcgtaggcttgctccggtgggcttgaccagcgttgcagaaaatctcccctgccgagcggaacagcgaccgcgtgaatcactggaatgacaacggagagttttacgcccaccgtatgcaatcgggacggagggccctgttccgatccatgtccgttcccttcatcgcacgatttccgaaacaccccgatcagaggaataacagcggttcgtctaccggcacgcgtctcatttgaagaggcacagcgatggactttggggttttctcccttcgtgcagtcgcccatggaggaaatagggctttcatgcctggacgcttcttgatggcaggcgaccgagtcgcgttgttttgcccgaccgcttgcccggccgtcctcagagacctttggctggatgatctctgagggtctgccttgcaacgatcccttagaacggccttctttccgaaacgccccaggaaatggaaactagattctcgatcgcatccagcgcggcgcctgaagggagaaaaaaagagtcgcgccggttggaggggaagagagggagaaagtcaatcattccgtcggccagaacgagagagacgagagcggccacaacgaactttttcgctcatttgcgatgatggacgctgcgaacaaatatcgcgcatcacgcaacgaggatcggagaagagggagcgcttggggtgagcacgataaagcgaaagcgacccgaatccggcccaaagtcgggtgtcgtaatggatttccgattgttccgggatcaccctccggataaactaagacgggtcgcagtaattttccagatggttgaggattccgttgcaagcgggctcgagcgtcggctcgggtcgcgtccgtccattggctactcgtagcggtcggacggtgtttccgagtcgctgtctctgatgcggatcgattttctcggtcgatgtttcggaggagctccgcctcaagcgtagcgctgacatgcccacagactcgacgcccaacctaggagcctccgaattcctgggcgtctcggagttcgtgtctcttgtgacatcggactcgtctcttctcttccgcaggacttcttgtgcatgccctctttctggaactgagggataccgccctctttgtgattttggcgaagccacgccctccatcgtggggggaggggaggagaaggggggcgtccattacaaggctgaggcttattttttcgctcaattgagttcagcgctacagccagtactgctggcagagttttcgctgatgccgccactgcgggaaccgtcgctcgacgtcgagggcgggagagaacatgtgagaggcatcattagattttcaatacgactcgttggctgccgtttttgggcgccgtctcccgttcaggagttgccccgaaggcgagcaggagaacgtcaagtggtttgatttttttccctgagccaaccatggaacttacgaatagatgactctctggtagttccatggacggacaggggggcgggggcggacgaatggatcgccgacgtggaggcgggttggcaggccagatgaagaaaacggagaaaactgggtgaggcgaaggggaagcacgggatgtggcggcagtggcgaggtaacgcgcccggggacgagcggtcgcgtggcgaactaaagctaagcggtacttcttctcttcttgctaatggttatgggagaggtttcgcgtacaaacgctttctttaatgggccagagagagggacagagggaagagggaaccttcgcctggagcacaacgcgaattcttccgcgtagttcactcgagtgtataacgatatgaggtccccccgccccttaccacgctactcacccagtttgccactgctggcaagacctttccggtgattcgagcattcggacgatttcggcacccaatcttgaactaccagcactgtggaagtctctggaacgtcgagccaaaaccaagtgtcgaatgtcgtagagtacggacccgacaccgtgatacgagaccaggatgtgccgtcatccaaacaaaaatggcgactctgcgggatcgacatggtttggcccccgtgtatgcgtcgattccgatgctggaacgggaaccagctgcaacggcataaaaagtaatggtaagatcaggtcttttgtgcaccgggagtatatccgattgattcggcccgcgataaaaacacctgagtgtgttttccctcggcaactacagccggttgcggctcccgctggagcggatccgctcacttgatctcccactgcctgtttccgttgaagcgctctctcaggttttgagcgttttgcgcccacctgcacccgattcagaactctcggaaagaacagcgatctgtacaatgatcggagtggagcccccaaggcgttggaaagattcgtacccttttgaggaacagcacggcaggaaatctccgtgctgttggggaaatgattggaataacgaacctcggaggttctcgggccaaaaccccgctcagattagattcatacacggaacattgaggaggaagatcgtgtcatcctttcctgcagcggtcatcgacactctctctccattcgagcagttcggccatctcacaccgagtcttatctgggagaaaccgaaccgacgtcttcctcgaccacaatgaggtcgcctcggtctacgttgaaatgtccagtcatcagatgaatgtctatcgtggacgtcatcactgaagtgaaaccgagggtgacacctgcgacagaagcacaaaccaccccaaaagtccgtggaaagtagttggttggtattcgccaagtgaccacgttgccgcgatcggtgctagagaggggaaaacggaatggaaaatggatagattcggaggaggaatgagagtcggaggaacaggacacgcagttgcactgccacgccagggacgaggagagcggggcagatgggaaagcgggaatcgaggcgagcatggggaacgagtcgaggacggagttgagaaaacccgggaagggctgaagaaggactggaggcgtcggagaagaggaaacaggagcatggagagctcatctccggatcggaaaaggatccgagaacgggacaaacagatgcgacgacgagttctctgttttttcgtcaagtaggtgccagtcaggtgacaactcaattcggcaactgccgacaaaagttcttggttgtttccgagtcggtcgtccctcagaacggtggcagtcgggggtttgaaattgagaatcaataaacaaccagccggccaaccaagttcctcgcttggtgttgccgcgacgttattccattctattcggggccgcggagatggcaaaagtttggtctgcgaaatgtcggacggctagagcgacgcttggaggaaaatgggtcggaagatggagattagagtggaggaggagacacggttgcggtgcagacctgcggcaggcaggctggcggcgtgtaaaaatgcacagtaattagtagctgagtagaacggagacgctgaagtcttttgccccgtttcgtccctttcacataccatccatcccaccattcgaccagcggagcttctcatccctcttcggcccgctcctcccacgcgttcttcttcctcctgtctctcgtggattctccacgcgctcgcctgctgttcgccctctcccgccgcgcagtcgttcggtcgaccaaccaagcaaagcggatgagcaaaaatccaaagcaacatttcaaacttttgcttccactgctagaagctgacgtcggcgcggagccgacctcagcctaaaagtgagaggatgtagttcgagaactgaaccctgacttctgcggggaacagctcggtgacaccgaacccgttgcccggagcaggaaacacctgcgggccttgtgggccactgttcttgaaacgcttcggtcggttcaacgaatgagtgaaagttccttataacgaatgtcgggatcacgaatctctcgacttagctgaccttctccacttcctggggttgacgatgatagttttacttcatcacaatcgatgactacaatgactcaaatcccctccttaagttgtgtttatcgcgtcaaaactccgcggttcgattgtacacacagagttccccgctaacttcaacgagacgggcacacactcgactagagggtgagatggcgccatctttcttcttcgtttcttgtccacaatccaggctccgaccaccttcgttattccccgggagcgctggagcgtcatgcgttctgtcttcctgcctactgcactttgctagcgacacaatctagaatttcgccattatcgggaagatccggaagcagatccccagtaataattcgttccgcatcgatttttcgatctccccctctgcgccaatatagttgggaggaaatcgttctacttcctcagacactaatgttcccatggcagacgggggaggaagtgtcgtgtgcgaactcttctcggttcattccgcttgtctccttctctcgtaacttttccaactacgcgtttctacgggcgggggccaagacggaggagggagttagattggaaacaaagccgagatgcggatttttattcggttgtcaggcttgcttcatcttcacgcagcgatagaaactcttctcctggacggtggagaacgaagaaaaacccaagagaaaacaagggagaaacagaggttcgctcgctcgtccgccggtgggctggttggaagcaattttgttagtctttccattccgtatccgcctcctctgttctccttgtcactcatccactcttccctgttatcctttgcttcattcgtttcttccccgctcggttctccctactgaacgtcaatcaatcgactattcgagtccttctcttcttcgtctatataaccctcggatatttcctctgaactttttcgactccgcacttcttttcccccctgaagtcttattctcgtttctctatttctgccctgatgatagagtgctgagcattcttgtcgggaccaccggctatcgttctcggttcatgatttccagaagagaggctgctcgggttccaatcgaattcagcggccctcggataggggagccgagacatctttcgtggaccatcagatacagacgaagccgaaattcttctccgggagcgtttggcccgaagccattcccgtcagtttctcctctcagtgtcccgcgccccttgattctcagatcctgtaccgcgtgtatgatcccgcgtcgcggtggcttccacccgaatcttcattgatctccctcgcggagagaaacgagcgaaaaagcggaagacatcgaagtgtgctccgtcgtgtggctgtaccgtgcgagacaaatggtcttttcgcgtcatttggcgggctgccgcagccaacgctacaaaaacattgattcctcctcgatgtacggtcatacattaggtgtttatggccaccaccgacgccgctttgcacaaacgcttgcttataccgacggagatcgcagcccgatctccccgctcggctggatgcgaagtggcggaacacctggtcgtccaccagctcaaggaccctttcgctgtggacaccgagatctatgagctctccaggttgggagaagctcccgtctctgacgctgccacggttgaacaagagaatccatcgcgtcgcatagatcaccggctacaagtttcgcttgccacacagattcgaccgtttggggagcgaatttctcacattcacatcgtcgacggtctcgttcggaaaacgctcgcggtcgactggcttggagagcaccgagtctcgctgcgcttccatcgcagaatccatcctgattcggtgctccagctctgtacattcataggtacccctctcacgccccttgtccgggccccgcattccgtcgtcggagttatcgggggcggggagttgctctttgagtcattcgtttcctcatccgacgaatggatgtgcgggacgagggggacggttggaaactcacggatagccggcaggaatcggcgtggcattcatcaacgcgtgtcgaattccggagagacaaacggtcctggaagccagtctcgccacggggatgaacaggacgaggaaacggaaaatgtgaattcaatgcgaccgaattcaagcaatgaaagcaggagacactaactcgggggaagttgaaactcggtctggaagcgacccgacgcggaaccggagacaaacgggtgctgtgggaggagagcgagagttccgagagaaaaacgacaatggcggggtggaagaggagggaaggggacgggggggtggcgccgctcccacggtcgaggggaggaagagacaaacgggcaccgccggagagccgaaggacaaacccgcgtcacgagagggagaacgaacgggacccaatggacagagccggccagtgacagaatgtcccccgatcgcgcgacaatacgttcaagtcggagtataccagcacgccgacccgctcgcccttgaaacaatcgctgctaaacgaagcactcgacggagccaactgaacgaaccgggtaacggctgtcattattgccgatgccaactgcgccgtttcggaactcactgcgacggcaacgacgaaggcggggcagctcgggcaactactgctattgcagtcgctatcagctggagcagcggtgccgctccttccgcgcgtatcggaggataccgtccttatctaaattgcccccgcctgcgtcggccccgtttcggagccacgaaagcgaggcctaacgaatgcacggccgaatggaatcgcccctcgtgacgtctccgttcacggagaactcctcacggacggacctttacactatggctcaaatgggaggaatacgtcgacatcgcagaatctcggggaattcgcggatcgtttgggtttgcgtcgcctaacgcggtctgccgatgggctcagttgatcggcaggcacaaccggtactgcacgatggcgcaaacgaagggcggagcgggtcctcgagggccatgggtgaatggaacggagtgagcaagggagggggtcgcgctgggtatctagcgggcctttgacagggagaagggaaggggccgggcgcgctacgtggtccagctacaaatgagccagggtttgccgcctgctgaggtcaaataaaatgtcagcggtctcactggctcacttatcagatcctttcagaactgcgaacgtggctctgaacgagggtgatcgcaaactccgaatccgaattccaaacttcgcgcagcgactgctgtttctgcgttcgcgagataagcactttggcaaataatccggaggatacggctccgatggcgttttttcggtttcagcatgtcaacagtgtgttccgaaaactcgacagtgaccgaaaacagaaaatgcgcgaatcgtcactccggagctgttttcccttcaaaggaaatggaaatcaaagtagaaaggaaggaagctttttgagagcattcgtcggttatttttcgacagttacccgagagaagcgcgcggggcacttgcggaaaacgggatttactgctgtttgtcttgaagcgacgaaggaaacttttctttcctcctctattctcggacgagggacgaaactgctgccgccggattagaagttcgaagaagaggatatcctgtcaaaaaagcgttgacttcctccggcgaaacttgcagtccagccgcccaaacggagaccccgcactaccgaggcggcagccgccgtcgccgccaccaaccaatcaagagcccgctgacgaagattagcaacccccttctcccacaattctgctcttcttctccttttccgcgttctgaagggtgctgaacagtgctcgatgtctccaagctttttttccgttcggtattttcgtccaaggttagtcgaagtcaagaggaacgaacctgaacgaacggatggagagcagcagaagcacggctcggtcgaagacggagccgaggcttcgcgagagatatttaaaatcccgagtacgtgatcggctggccgtgcttgcgaacgcgagcggcgcccatggtcccaatggcagaagtgtgcaggacgactggccgtcctacgttgaggactcccatgtggatgcggcacgcataccagagggtaatccgcagagctcctacgttctgtggtggtggttcccgagttgcgtcagggaacgagatctcgagcagcgaagttgctccgagcgaaggcactgaaatgtctggcgtcctgaaccggctcgcacgaggaccggaccgcctgttacacttctgtatcgcatcattacttgattgaattagctgcaatgaccgcggaagagaaacgttcgttgactcgatcgagcagctctgctcaccctccccgctttcgaaaacgacgcgtaaacaaagcctgctccgacagcccctctctcctctttcccggatcccagattcaggattcgggacacgaaaagtacggccacgatgaggcaatttccgtcttctgaggccgcggccgaccggcggcgttgaagcagagagaattccagacgggaaagagccgagactcggtccgttccgaggtcctcatccaaaccttgaagaacgagcggcatcccagctgttccgaggagcctttcctcgtttgttctcttgccgagttcggggctccgttcagaccgcgcgtcgggagagctccccgatgtgatgtcgttacgtgagctgccgggtgagcgacattcgaacgaagcgacgagaatccagcgtgggaaagaacggtggaatatcccctggcagcggggaagggtccctggtttccgctccgattttcttggtttctcgagacgctgcgaactagttctcgcatgtcgaggctttcgtggagaatcgtcggatctccacccggacctggctgccttggggagaatagcgcggggggaggggggggggtcactcagtctactgaatctcaatctgcggcactgcttcccaccctccgttgtaacccggtcgaggaggcgctctcgttcggccatcgtcgaatctcccaagatcttgaatccgtacaggcaagtaacctcttgaagtaaattggacctcatggcgctcgttggcgagttcgtaatcggagagtggcgaggcacgcaggctgccatccaagtggtaccgtatcgaacagatggattgatggagcgccagaaggcgtgaactaactaagtgactaacagcaatgaaggaacgaaagattgattgagtgttcctctctttgcccaaactacacgtacggctactcctctctacgctatcgtcgtttgctcgtcagtgagaagcatcggcagcgccatcggaagcagcaggcagcctttgagctcgttgatgatagattggctgagctcgactcgaccctggtcggctgccgagaggcgtcccgagcagagagcgaagttaaataatggcaatttattagctggcatggcgagcgcctcaccaaaaaaggaagagcattcagaagggggaggaaaaagttgcgttatgaacgacggaagggcgacgactgaaaggaaatgaggaatctgctagagcagctcgcagagagtcggaggcagtacaaagctgaaagcgggtaagcacgcaggcggtgctcacagcaataaatctcattgaatgaacgtgaagagggcaactttggaggccgttgcctcggtatgtccgctcaactcattcatttctcccgccagccctcctgtgagtctccgtatgcttgatgctttccgtcagaagcgtcggtgaaaggcgcgggccatttgccacccgcattcgccaccccgtcgctttgtagcaggcaaaacgaatgcaggagaccgaaaccgtgaacaggacagcgtcggggaaggagggaggcgcttcagaaattggagttttgcccaactcagccgagtcgcgcgttctcggctgctccggtcggcgtctcgttgcttccgggattccattcccggaccgatgccgctcccccagcttgactcgtcgcctccagccacagggcagcgccgtaagccgaagctccattcgcaccatgttccccctcgacctccgcagggttcgcgccatgtcttatgcttctgtccttcagcctcctgtgaaatcgatccccctctcctctctcacattcgtaaatgccccaccctcgtatcttccgcgacatggttcttctttctctctatcaatcttcgcttctctccctttcgttttgtctctctcccatattctctttctctctccttatttctctctctctctcgctgtctctcttgctttctatctgtgcctccctccctcggcgccgttcatccgcatccccgctctcttcctcactatcttttactgtcttcagtccttccggttttttgtcgcacgcgcattttctgtccaacattgcgctgtattgcccgcgcaagggcgaaactgatttttgcgaaaccaggctccgtttccgttgcgattttttacatcgtgccgggtgacagaatacagcgagggaacttgcacgtttccgttcgtactcgcgaagccttgttgctccgtcgggcggctccctgcttactgaggagccgcgggatccgtacgttgcagactcagtgctgcttcaattatatacgttgctcccgagcttcgactctcggtgccgatgctcggctctcgtcctcttcaatcggcttcacttcgcagggatctcttttatccgatcgctgagcccagcgtcagtagcatgcgcagtatgaggctggcgagggttcagcccatcccctggttctcggttctgtactatcaaatatgagtttcagaccgaagactcatcattgtgaaaattctccgaggctacccccttgggaggaagatttcggccttctcagtcgggatcctgggtacaagcctgcgtagcgcgccttgttccaatggagagcagctggatcgttgggtgttgattgaactcagcgcagaacgagacgggaagctagcgaaactggcagaagaggttggaaacgaattagatccattcagatcagcaagctattctgctacgctttcaacccccatgagcctatgctgctccgttggtattggaagagctgaaagcccgtcctcgcttcatccaatcatcggatgtaaatttcgtccgccctacaaccgttggtctccgtcgtcctccttttttatcgttctccccagcccggccggctctgcccgtaactcccctcgcgttttctgcttccctgttcgcgcttccttctcctttcctgcttcttcttcctcagtcttttttggtgatctctcgcgtttcggcgttgaaagtgcccaccgtgatctcgaggaaggaggtttcagcgacggtgagagagggagaagttgaaccgggtggctttaattttacacttggctcctttgatgagcgatccaagatgggttcggctcggctggtccaagcctgttatttcctctctattcgctgttccgcccgggctcatctgtcccgctgatgcgatttcttagaggccattttttgcttccgggagctcgcctccatttgattttctggctctccgcgtagcgtgaccttggaatagtttccccgaggaaaagagaaggaaactgagcggttgatccgcatcgagaccggttcaaggagctggcaggatggaatcgattctgcatcctcctgatcccatccattctccctggctttgcgaccgcacgatctaccgagtgcctggcacgcgtgcccagcatttccctcgagttgggtgggtttggaaaatgtgctgactagcggtcaccggggagacgaggcagaaggcagggggccgtggaggcgttggtatcgcggcgaaagggcgcgagggcttggaaaaagggggcaggtgagtgagcgtaaatgttcgttggctagttcgccgcagccagcataaaaatttcaccccgaaacaacttagcccagcgggaaaaagagaggcggggcagcgggagcgacggagggcagggtgcggaggaaagaacggcagtcgcggctcctctgtcaaccggagctggcgatcatcaatacactgcgatcggccgacggagccagggaattcgttgagcggctcattcacggcatccgtgaatgttatcagatgtttttcgatcccccgggagcctcagcgtcggttagagctccgtcttcgttttcgattcatgacagaagctggaagcgctttcacggatggggctggatcagattcgagtgagaaaatgcggcgattgatttcgagtcgttacccgggacctccgagacgttcgattattatcgttgtcgttgccatctacccgaatcgccatagttcctcgagagctgttcgtcgatggagctatggttatctgttcctccatttgaaagaacgcatctgtctctgcgtgtgtgtgtgtgtgttctgctcctcttggagacccactcgacgggaaaaggaatattttggcaactcgccctctggcgcccaaattgtacttcatattttccccggtatcgatgcaccactccgcgtccccgtctcttccctccattttgtccttcatccgaccagtcgagtcgcagcgactcgagccgactatcgaaaatccttgggatcagcagcagcacaaaatatgatgcactctgtagccagcggacgggtagcgcaggcagaaggcggggcgcgagagaaaatatctgcgtttggcccgctgggaagaaaatggcgaagctttctgataaatttagcgcctcgtctcgtgccgggccgtgatacgccgaagacgctggagatgtggaccagggctcgatgaatgcagcagcctccttcgtctcgcatggagctattcagcaacattttttcgcggtggactgagatataggggccagctcgttcccggaaccagggggcgaaaccctttcggggcggttcgaggaccgcgagggagtcggcgacgacgcctggggatgcaaccatcagcctgaaggagatgcagtaacatgagctttccgtggaggaacacattccggaacaagaatttcctccagacccattccgatcgtcgaacggaactgcaccgattcaaataaaatgccactaacggagatcgagcgtgtgtgtgtgtgtatgagtgctgctgcatgtgtacgtatatgacacgccataaagataacaagcgaccaggggcacgaggaagatctagctctccatccaatagacaggcggaggacgaggacctgggctcaggaggaggatacgatgagagacgactccagcgaagagtttgggagagagcaaatcggttctgccccgagttggagggcttgcgttggtgagattgtcggtgtgccgctagctgactggcaggcaggcacagcatcgatttcgaagatttatgaccggttcgagatctctccttcctccatctgtgtgtctggagttcagagagaatcgtcagacagcccgggagacggacgcattgacagagaaacggcggcgcccgttcgccttcgaatcacccagtcgctcgtcacatcgtgagagctcgcctcagtcagggctgtcgaggctgaccgtgttatcctgtattacggataccatcgctcatctccttgacaaccccccgacaagtgaattgcggcagggattcatctggcgcacaggatcacggtcgtcaacgagaagtctgcggagaggtcgatcaccaatcgttgaatcagtgatcaatggatggatgaatggttcgaggatgttgcgtcaccgggcgattgagcggtgacgattgagaaactgtggtcggatattcattttccctgcatccagggaaagcggcgaacgtggagaattcttcttacgtcgataaccgagagaagttagctgcggcatacgagaggcatcctcttcagctggaatggctgcgtacccgacggcatgttgacccgaacgcagccagatataccgcgaaggctcgcggcgtgaacgctccgctgaaccggcggaaaactttcacgcagcgccgcttgaatatccaacaagctgaaatagaaggcaacagcatcctccactttcctgacggatgccgtcggggttctcggagagttccccgaggcattctgaggtgctggaacctttcgctcacggtgaggagacgttcatagatcttgccgcagatctcttccgcgtcccatagcccaaactctcatagacttcccagtcggagctcccgtattttcctcatatttccctcatcgtctggttgttatggttccctcgagattccccctcatggttttcgcatggtctgcttatagccttcgctcagttttgccatatcatccgcgaggattcgagcgacgagttctctagcggagctcattgattctgacggcgctgtagaggtcacttggctgtcgccacccaggagagcgattgcgtgcagttctccgttatctgatctggagtcttcttgtaacgactctcttactatgggaacaagtcgttttgtcgtgcgcgcttcaacgtttggagttgggagggactccaatcgtgtcatttgtgtcggttggaggggaccgacgctcctggaaaagagtcggaagatgaattgaggacaactttcctgtcgtttctccagtattcctctggtctcgaaacatcccggcaaccgcatgaatcgaacgcgcgaatcgcgttgaggaacggccttacctccgcctcgccactcccagaattatgcctcgtcacgttccctgtctggatggagtcttgcagcggacgaagcacgatctggtcaagatcccagatttcattttagaccgggcctgcagccgactgtccgtcgtgcgtcaaccgattctaatatgggagacggtgcgctgcgactcgtgggccagaacgcgaaatatgagtttggctaaggttcccgtcatatgagatcggaccaaacccagagggaagcttccagtcgacaccttctcctagcccctcgacccgagctgaagcacgaaccgaggagaaatcggagccacgatagaggtcgcacggtcaggaaggaagcacaccgaacgtacagtctgctcgctcacgtgatcggaccccctcgagctctgggatcgctctcgtcgctgacagggcgaattccagctgttcatgtgtgattactgagctactcgctcaaaaataattttgtccgatcgaacgccgacctgattcaatttcgcaaggagcagccttctgcatccgcgtcaccgaggagcaactcgatttcatttcattagatcgccggagattctcctccgtgatgctccgctgccgccgctgctcctagctcgcaagagctcaccgccattttgtgcgcgagctccaacacaaaaagagaacatcgacgaaagccgtaacggcagtcaaggtggctgtggaggatatttcccaagaggttgacttcctgctctgttagcgttagtcctcgctgctgttactgtcgccgttaatggcgttttcgatccgtaattgattgatctagccatcgcgaatagaaatgagagattcactcgactgggaaagagtccgcggagtgaccgagcggcggcgacgacgactcgttgtgacgacacagagacagcaaatagcggttatcgaacacttcgaggggaagatgataccgggtcgtgaattccctcgttgtgtttgtttggctgttcgtgtttatgtgcgtgcgtgtgtgtgtttgccctgccatttgaaattctttgtcgtcccccatcctctaacctcaattgtttgctttcttccaggtaagccctgagcccgtgtgctcattgttgactcgaggaggcgaggacggcagctaaagatgtcacatttgtgctccgaacggaagctccatctcggcacaaaccaacgagtccttcgtggagttcgcttgcgccagggaaccggccgctgtggcggagttcttccaggcgggaacaatgaacgaattctcgagatcgccaggatgaagcggacgaacgcagaatcagggttcgtcgacgttcccgcagggtgtcaacgcaaacatcgagacggtttcgcagagaggattcactcaaggatgaggcaccatagtcaagccgactctcaaaggctgccagggatagcgagcagaggagcaaggcggggagctcgacaaagaaaaaggcgtcgccgcgccccggggcgctcgttcgctgtggaaaaactcgcaagcaaaccgagatcgacaaacctacgagcgatggcgtacggcaggggtccggagagacagatcctttgctcgtgtacctgaggagcttgttgttagcccacggcggagcgtgcgtttggcacatttcctattagttcgcaatctctctcctcactcctgaaataggggagggccgagtcatcgacgggctgagcttcggatcgcagagttcactgagcacgatcccgggaacaagtcggattcgaaccgtggagagatcccggagcccactgattcgccgcccggtatcttttcgatcggtgacaatgacgatacacgcccgcggcttcctcacctctcgatgaccagtacatgcggagcaggtacaggttacagtgctccgggaagagccgacattgctggcttcctaacctaacctaacaccaccacagcggacgagtccgtgtggggggaacgactcccggaactttgcacggtacctcgaatccctgctcatttcgctgagatcgagcgaccgctggtccgctcatgcgcatctattcgtaccggggtttcctctaaattatataactttcttgagaatccgagccatcctattctcgggtcccatctccttgcctcaagtgagatctgttagaaattccagaaccgcacgagcctcgatgacgtcactgagaacagtaaccagggcatcgagtgtttcgcgagaaagcaagttaggaacgtcgagatcagtagaagtgcagccaacgtgatcctgagcgaaattgaaaactcccgcttgtggattccactctgaccgaaacccctctcgttgtgaacccatacgcaaggcttttttgacccctttcttccttcaccttgctcacatcgctgcgagttatcgttccggacttaatcagggtgtagagatcctctcgttggctgcgctgtttattttaattttgacagtggcattaaaatggaatacaggcaatctcggctgagaaaaccctcggttcctctcgggaaaggaatatttcgagcgaggaggagaaagaagaaggaagtcaacgagtttccctgaacgctctcaagccatcccaggatggaaagcatgaacgcgacgacggggtcgctgtttggctagagagcggtgaatacagatagcccgcggatcaaccgtttctcgagggtgcctgattcaggagcgaagcagactaccgaatggagaagaagaagaaccgaaatacaacaagcagcaattcgcttacatgaacagcacagggtaacgagtgtcaacagagtgctggccgacctcgtaaaaccagctcaatcgactctgtatctacagcaacgacaactccgccaacaacgacaccgatgacggcgacaggatttacgagtcctgacgaaaagccgaaaccctgattctccacctgcatcggctctcgatgtcccgaaacttccacgggaagataagaccgggcgcgtggatgtcacagcgggacatgtatcactcacgcggaggattacctctcgataaaggccggcctcggtgtccctgaatagcgttgatcggtgagggaggaaaaacagaaacaagctccccggagggatgagaaccggatggggttttggcgctcttggtccggaagatgacggtttgggcacctgacagaagttcagaatgtatccttgactcgacacgtggtgaaccttggaatttttagcaagttccccacgagttggcatgcctttgaacaaatgtcaccaccgcaacgttttccatgtctgatgacacctggcttcccagacggcgctttcattcgctcgttcactgagagccgatgcccattgagttcaccgagcagagctctatcattgattcatggcatgttgtgaaacggccttgtgcggcgagctcctcctcaaccgctggtgcggccccctatcggtcggggcggcgggtcgacggtgcgccctccgccggcgactcgatcagctcgccggccgactggagggttttacccatcacggagaacggggtcgccttcggattgttcttcctctttgcatagcccagcggtgcgaccgaatcggaaacgtgtctgtcttgaagcggcgaccgttgggaacgatgcttcgccctcgtgttcgttgatgagggtcgcagcgttttcccagagtgacatccacgacttattactagtccattagagcgaggctatcgcaccggcatttcgacgttcggtcggttcgttggtcgaccgaccgacgggaagtctccatcccgttcgctcgagccaccgtgcaggggcggagttgcttcgtcgagccttcgatgcaggagaatctatcaataacgacgtgagccatcctcatctgtatgtagtagtcgatacccaggggataagtaagagggacagccagtcactcagccttcgagatcgaaaacgcatagcgaatccgcggaaccatgcctggcgaagcggttgaatccgggaatccttgtccgagtcgctttccggcagtctcctcgtttgcttcgtccgctccggttccgccacagggacatggtcgaaagcgctgaaccgatgtgaactgagcgactatctatgaagcagcgaagcggcagcgaattcgtcgcctagagcgttttgttaatgtagattcggtgtacgatcatcaacccaggagaccgccgagtaggtgttatcatcgtcgttggccccgggccaacagcgaagccgaaagtacagccaactccctctcagtcggctgtttacgtgtgtttctggctgcttccacggtaagtgttgggccaggtcttgggcagacactccgtgacacacgagaaattgcgtgcgaagcaagcccgagaggaagaagcccggatcggcgcgaagagcgcccagagagaaatcagaaccaccaagcgacatccaaccgaggtccagggagcaccatacgggggtgtgatccgggccgcgcgacaaagtcaacataggaagacaaccggaccaggggagtaatcttcaggcggcagcaggccgctgtgtgggagtgcggtgtcagtttacgcagattaagtagatgtttccaccctgaggaccaattggctttcgtcctgaccccggcggggccgaaaagtagcaaaacagccgaaagggggccttcgagacaatatctctaagcctcgttgtccaactggttagccgatgcgtttcccgactgaacccctccgaggctttggacgagaccaccacgaccataacaatgggaaacgaagcaagaacactcctggaggttcgccgaatgagggaggaaaatttcctgacgttacatcgagtctgtccgttcatttgtttgtcggtccctccatcagggcacctcgtgtgccgttgcttccgtgtcgctggagctcttcatgagcgacgtgattccttcctcccaacgtgcgacggccggatgggtcacgtgaccattttggcccgttagttacctcgattgtcgttcattgatcgttcgctgtcccgagggaacctgtgtctatttcgggcaaccgggtctgctccagtcgactcggcgggaattccttgttctgttcctctggcccggttcgttttcggctcgcaacgacaatgcgctcggaacctgcagatgaaaaccccacaggtgctacggactcacagcggggaagagcgggcaattcactcgaatcctaccgccctgaaggaaccgcagccattacgatcatttatttctgcggaacgcgttgcagtttccccattggtcgccccaacgctcatctgccggcacccccgttccttcctcggaagctcttccccccatctcagagagccgcgaagggggaaacgatgtcgaattaattttgggatattttaagctcgctctactctctccgcccctcttcggacgaacgaaagcagtttagagagccgccgcacggctccagcgagtgcaggcaacggacaaacgctcctctttttgcatagccgcctccctcttgaccctcctccgttcaaacctttggaatttcgttctttccatttcgggccttcctcgtcttcagaactccatcatcggttgagggcccccgctccggggagagcgtcttcgaaacgcggtcctaactctcggaggctcttgtacggcttcagtgaccctcgcccaacaatggatccttctcgttcggaactcgtctagcgacccggaactttccaacgtttgccgagccgctgtaaaaaagatatgtcccagttcttggagccgttcgttcacaagggaaccatcaacggattctacgtcgacgcggagggctgcgagtcgtgctgtctgacttccgagtgattaacggagcagcgcttacgacccgctcacgaaaagaagagcaagcgcggagtcgcttccctctccaaccagttcacaattaatagcagctggcgttcgcggaattctgaggaaatgctgctggaaatgttttcgcagtagaacaacccggagcaatctcggttccgtcaacaataccagctgtaattacgattttaaccgcgagtcctcggtggcaataacgacaggagggggaagagggggtgggagggatcggccgtgtcgaggtcggcacttagggttgccagtcgctggaatggccaaggcggtggatgtatgactggctgctgtcgcccctgtcctccctgaagcaaatcaaagttccgtctgtttctccctctcagttaatcagtgacgaagtgttggtgggaagtttttgccgagctggctcattcaacagctgtgtgacaacgaccgaggactttttgactctgctatcagcctactagtaagccagttgaagcttaaagctcattaggcgggcgaggcagcagacatcaccatgaactgcccgcgtgtcagcttgccccctccagtccagagtgatttttcgagccattcctctgggtatccgttatcagcaacaaataggcattgtaagagagagcttcgaatccacctgctccaacacaatgcctctcgattcgtcggagtaccgagcgcatcgagtttcgatctgtcctcttgctgctccgttcccccactaaatttccgccgccaccgattccatctggggctcaaactgatccgagtgtgcaatccacgcttaacatctcctgcgtctctgtgagtgctctcgagaccgtagtctggaagtcgacagatgctgaagttcaagagccacgagacaccttccaaggaaggggaagacgtttgcgttgagcaagcaagcctctctgagaaatcgtacactcaacagccatctgtcatacacagaaacaattccacagcgatggaagaatgtttccacgtcgacatgtccttccaatcaacgccttcgagtactcgaaaggaacgctgacccaacggtgcccagtagtcggacagcccgccaaaaaggcggccacctgattgatcgactgattgaataatttccaactaatgagttcacgcgacgatcacgtgattcattagctgcaccgacgggaccatgggatccaagagtcaccgacggaatcccaggaagtttggcagcgctttgttcccggatgacggaggaatcgaaaacggttggcgattcttcagaaacctcaaccatataactctctctccttttcctcctctttccctcttccccaaccggaacgagatcaggagcatagatgcactcggagctcggacgttggcatgaacgttagtgtcgtgcggcccctcatctgatggcataatgtacaggaagggttttgcgttttccgtcctagcgttccgtcggtgtttttctgctctatacgtcgacatccctgcgtccaggcttctgccgcagctcctcccgtgcgggggcaggctttcgccaaaaagcttttctgcgacgagacggggaaatccgggccggcaagccgtcagaaagaatgtcacaggaaagggattccgactgtggccaaaacttgttcttgaattttcaaggttcgagatgttcgaaacattgatgttcccacttcaactcctcatgggctttctgctagagagaagacccgatgactcagagttttgggtatcggaacctgctgtgctctctcggaggctccctctcctcctgggcgtctactccctgtttggactcctgtcgggtctcggcacctgtttcccaacgtcacggcccaagtccaactaggactcccacacggaagccgttcgtgggcaccggtccgttgtcagcggcgcaaacccgatcggcgagcttcggtaacgatctcgagaacgatctcagtcgggagttcgtgtcaccttgaagcgtcatccactgtactcaagcccaaatggaacaatatcttcgaacggtgcggcgaaatggacgctcttggattactgagcattgagatgtatggaagtcgctgcaatagttgctcatgcctagctgtggcaccggtcgtcctctgggtttatgattcgctcttctcgacagtatcggccgccgcctttccgacggtggaagtagcttgacagctccgatcgatctgccatcttaaccgtcagcgccagcaactcccgcatacgaccgccttgtcactgtcgcagccttataatgtcatgtccggttctgttgtaacatacgtgagacggcacgtaattaagccataatagcgcgccggggcctacgcgagcttgcgtttatcgcagccgacggcctgcacacggagagcgtaacatttcgctttcgctcggtcggctcgcatttcgcatgttccatcttcgagttcgcgttttcggaaccatcgttgtccacgaagttacacactcggcgaatcagttttcgataaatacgaacctctgcgcagttctgtcgggagttcctgcaattgctgcctgccgaggtaatgaggtctcgaacgtagtttcccgttttattgttgaattctaaaatctcgggttgcttcggttttccacgcactgagggaattccttcctctaagaggagctttcgtttcgaagggcaggagaactgccatctctcgacaaagcgacggtcacgccgaatttgtgtcgtaatgaaacgtctgcgatgcctctggagaagagcgctcaagcgactgtgtcggtcggtggatttgttaggcggtcgtccggtgcgcacagaattgttcggtcgtgtgagcacgtcatcacgagcatggtcacagcgagtggcctcgacgactcagccgccctgatgccctgaattcgcagcatctggccgcagtggaagtgtggccaagatgagcctcgtggccgtttcggcgaccgggtaatgggctccgcagatgagaagctcgtcgcagctcgaacggcgagcatcgtccgatccaaacaatatttaactttgtatcgattcccgtcagaaggccattcgttccgtgcctgtccactcctgcctcgacccgtactctgcgcgtcaatgctccaaggagcgaagctggtggaacgggaccaggccactgtcggagacctgcgtggaggtgcagaggagaaacggggccaaaggagtctgtgcagcacaacgtttgtcgctccatttcctcgaacaactatgctgccttgtgctgcagctcgcgacgcgtcaaagcggcgctcgaggacctcgcccgggctctcggcttcgatcagttcgcctctgcggagaagctgcgcgagcaaattcggcggtcgccttcagcgaagccttggcttactgtctatcaccggcgatttctctcaaagttcgcgccaactttaaaccttttctggattctcgcccgtccccgtcggtataacgcgaggaataaacagcactcgcgtcgggagtttctccacggattattctttgcgaggagcgagagcgcgaaaacttggttcgcctgtgcctcatccgcaagccgcttgcgccagttcctcacgccaacaattttgatcagtagctgaaggtcatgaagcacattatcggaaggccccacagctgctcccgatcccatcgattcctgccccgttcaggagccgtcgtcttcatgacggcgactacatacagctccagagccaagcggaaagagttcgtctctttgcggtccctctgccagcgccattgttttccgcggcattcaccgcgctggcccgagagagatctctcttccgatgcggacgcttcgctgtaagttcccggatgtcgcagaagattccgacgcagtgcaggcgcggtgaggcaagacgcaacatgacacaacgagtctgcgtgaaacgaagccgctccgcgggacgaggcgagcgagcaagggcctgtggataggacagacgatgcacgactcaacagaacgagtgaggccgagcttcagaccgaagcaaaaagctatgttgtggggcgaggtgcgttgttgtagcctatttatatacaaatgcgcattctccgcgcaatttatgtgtgtaagcgcgggtctaagttgatcggtcgttcggcccgtgggagttgtgaaggcttttctctcggaccatccagcttccctccgtcgccttcctgctggaagaagtggatttgcatctcatgctgcccatccgccatctgacgacccacaccgccctgccaccgactggcttgctcgctcggctgccagcaaactcggccaaccgtcagccaactcactctacacataaattcgatgacggcccgacatgctgccaagccttctctgtcggctcgactcgagccggaggagaacggaggcggcacaagggaattcctgaaggaactaacacaagagggaggaagtgaacgaggagagccctgtgaaggtggatccaaggaacgagcctccttcggtcgctcgctcgctcgctcggctagaatagaactcgacgaagcaaagccgcgcgagcggagtgttctagccctgagccaagcgaaacagataaggacaggcgcttggggaggcaagtctccagttggtctgcctccgtgcgttcgctcgtcagctcgcccgcctgacggacacaaacatgtcaggctttgttcaaagtgtagatgtatgatcatcgcctccgtcgagtttgggtcacggcttggtgggcaggactcacgcgggtcaataactgccaaccgttggtagtctctcgattgctccgaacgctgaatttatatgtccgcaatatactacatacgtacgtatctccagcatacacatggtagacacatgagtccttacaaaagtccaagaacgcaccgcatggtcagaacaggtgtgtaccctagccacatggtacatggaaatacccgcaatatggtagactgtaccaatctgtgagccataagtacatggttggtgtgtggtgcgtaccgctcagctcccgctcgcaatcccagaggggaaccgaggtcgggaagcagttttccgacgggtgggaagattcactataccggcgctcagccaagaggaagagggacaggcgaataccagcgatgagaaagagagaagatggagctgataccgaatgagagcacggggagacggaatggcgctcgagcaaacagcatcagactcaatgactcgatcttgtgtacgagcacgaacggggcgaggtggaaccgttggcccagaagagaacgtacggggagctcaggcggtcggggatgccgtgtattggtcgtgtgttgtgtgccgaggcctatagttggctgacagcccgacggactggctcaacaaaccgatcattgggccaggttggtcggatcaatgtctgcccgaggcgcacactcagcggaggaacggttccaacggaggaatcaaccagcgggcaggatcctaacgggtgatgctcccgcgtcgtctgagagaacggtcacggtctctccccccaactgagctcacacttcgtgaaagtgcgccgtcgaccaaacagccgacctggtggaagtgcgtctgtgtgtgttgatggatttatcgattattcccggggagccacgcggattgagctcggttttcactccggcccccgcgctcggcccccgttccccagggcagtgttcgaatcgacggctgctgggatcgagaatccgtcggttcgttggtcggtcggttgcctcctaccgtcgacccgctactgagcgactctcccgatatcagaagaaagtcagccgaagattccctcagcaggcgctcggagcggccgacagccaacgacgactttctcgcttcactccgtacgagtcggtttgtcgatcggatccggcgcgaaaccgtgcatcgctgtttggagctgtcccgaattccaggacaggcggaagtccggagtctgacggctcgggttccgattccgcagctctccgcgaccgtatttcgtggtcagagtcggtcttttgttcctcggccgccacaagctcgattcgagcgagctcgagtgcccgtccgatggaaccgcgatatatgcgactcccccaggatcgatgttcatgatcgcaatatattcctactcattcagcatcgctctgcgctgccgtcgggcctcgttcgtggaatcattcgtgtgcgttcccgttggtgtcggtcgaataatgccgtggagtagtgacactctttgtctctgaagcgatctccacagagttttcatccgcttacaatacgacgttcggctcgacgaggaaaaaagaagacgaagaggacaaaggcgacctttcgacctgtcgggaccagcgttggcgtccgggacgggatcgcgacacccgcctcggtttggtcgttcggtgctggcctcctcgttcacggtaaaggtgacttccggggtatcgcacgcgaacaagtttggggagcgctcgcgcaaggcactgagaatactgggtcgtcctcatcgcttctgattcacggggatttcggattgaatcttccgctgagtcctcctaattatctccatcgtcgtaactgttcacttgacgatcgcctgtaaaggccgggtccgtaacgaaccgatcctccatttttccctcgtccgagcagacacatatcaggtcaagctttttatgtcttctccaaagatgcacggctttcgagcaacctcggcaacgtcagaatatgcaagagcggtgaattggacgaacggggaaggggaaacgaggattaacttctggctgagaggaaaagctgtaaatattttatgatgtgacttaggctgaagtgggagattgccgaagggctcgggcgtttctgggaacagaccacggctgaaatgttcttctcctcgatcgacgtcacatcgaatcagcttcgccctcctgccggcttcgacgaatcatcaatccccaggcgattcatcaaagttggtcagtttactgatttgttcctcgttcgattcaccgacagggagatggcacgattgattcgggctcgtgaaattcagcgaacgcgagtccctacatgagatggaaccactcgaggtgggagaggccgagaacagcgtgggacagagcgacaatgtacggtgaagggactttaatactccaatgctggcggaagctagaggacacgagcgcatgggctgatatagtgatgcaaagtatcgttggggacacaggaagagagccgggcgccgacgagcagatctgcagttgaacagagcttagcttctgttgacgtggtccatattgtatgggattagctgctcgccgtgctacgtgagcgctggcacgacgcgggaacttgcgacggggaatcactgctggccgctcggctgtaagtcgacaacagcctcgtcgctgatacaaacgaactaacggaacaggcttccagcgtttttcgaaatccttcggatgccgcagtttgtccgccgcgtcagtcttatcaacgcttccaccacgctccggtcgcgatgccgaactcacttgggcggctccgctccagaagttgtggtttcttcgcttattgtgtccggatatgtcgtgacgtcaacgcttccgaaatataactttcccttatcgcctcctggcctcggcacggtatcgggccgtacggaacgggtggccgcagtaattccagacgcccagctccactctgagtccgcgcaggagtaaattctgacaaggccgctgtcgcgaaacttggtgcgcacattcgaacacacggtaactcagctcacccggtcatcgcccgcatttcgaacgaggttcctgaactcaatgccaagcagcagacgagtggaatcggttgactcgaagcagataatctgttcagttcgtacgagcgccatactctgctaacgtcgttgacggcgatggcggcgtggacctccccggaccgcccgaagtcgatccaaatttacattttcctattcgtcgttgttttctcaaggcttctgctcaacggcgcggcggcgtcgaagcgcgtctgcgtgaccggagcgggcggtgcgccgctatgcgcatactgatggcgctcgaaattcactctatcaagtgggagtggaaaagttgcgaacaactaaaagtgaaaaaaaacaacgagggaaagaaaaacgcagtcaataacttgcttgcagcaaggaaactcgttccgaattccggaaggagaggggagggagcttgaaacatagaggctccctcctgtcagtttatccaccgcaattccgggcggaaagcttgacacgaggggagtcctggggacgctcgagcggccgctcgaagaaagagcacatgatctgactgaagggtcagagcctcagcttagggtctgagacggagccgaaccgacttcctactcagccgcagcttccccttcttctgccttccgttttcagtggggctccctgctggtggttctgttgctcttgctgatgccgcagtacgcgtcctcttcgctcgaagtgagacttcttgcgtttttttcggtgggttcttccatttttggaaaaaccgagaacggaagtgagaccggcgcagcagccaaagacgagcggggttggaacgcagccaatcttccgatggactccagacacgtaaagccccgattatttgctccgatccctcaaaaagaaaaaaaaataaggatgcggcggcggaaagggatacgaaggggtcgtaagctcttcttattttggaatttccactcgaaacagatttcgaagcgagttccctccatcgctgggtgctgtctggccggcccgtgggtcggatagttcgatcggttgcttgttcgttcttcttctcctccgttcgttcgctcgagttcgccacctcgggcgcctccgctttgttcgaatggcggtgtcttgttaaaattgaaggaggctggctcagcgatttcgctgatgcgaactcgatatctcggtgccgctctcagcttgaagggtcgatcgccagttcgcaaagtttgcacgggatttccgcctgactcggggaggcgctgcgatgaaaaggcccatataagcccacaatagcgacgaacgaggtcgaggaagaagcgacggtgaggcgtcgcaggttctcgaggaatccccgttgacagggaacggaatttttgagataagttccccgttgttgcggtgtttgtacggctcatttgagttgtgctcgttgccgttgttcgtgtttaccggaggcagagagagagagagagagagannnnnnnnnnnnnnnnnnnnnnnnnnnnnnnnnnnnccgactaccggtggcagcagcggccgctggcaaccttctctatcctgagcgccactgcaggaagacggcgaccaagcgagaccgagcgttgtttccaacgagacttctgtgtccgtcagagaggatgaaaaaaatcgaaacaaaaaaagactttcctcttcttctacaagggttgctgccgcttccgcttccgccgccgccgccgccgccgccgtttgaaagaggttgagccataacagttctacccgaccggaggagcattgttctcaacgatttttcgaaagagaacatgttgccctcagcttcttccgagctcttcctaatggacaggatcatgaaacagagctgaactttgtgtttttttcctcgccgatgaagacgaagatgacgacgatgttgatgatccttcgaagcttgatgttttcccgtcttcatgatcacaacagtcatgcgacactcgacgatatcatcgaaaggaaacgctgcggctaattccgagcacaatcgtccctggcgaccacgatgttcgataatcttcgtcgagttcctcactcgcgcagacatcgacatacgcagcacatccggaccgggcgttcactgcaaatgtcttgcccccttcccccgaggaacgacgaactgttcatgattcaacgtccaacctcgtcctgaagcaacatttcacgtcgaagactttgcgaattgagggattgagctaaacaaaacgatttcgaagcattcacccatgttgacgggattcgcgtgacctcaaaatcaaaccgttgcaacttgcaacgaaagcaccgttgtttctgccgatatggcgataaataaatcgaataactcgagaccctcaggttcgagccgggtctacgggccagtcgcagcagtaaacgaactccaagcagacgttttttcgaccgaaagggtgatagatgcgaatccatctcgtcggaccgtcgagagtaggggtcgagcgaaggtccgaagcgatgagctccgagaatgttttcacaggactcctccggccgctgatgatacccttcggatttctgaacgtgcgccgaggcagcgcagctcatcacgcctggttgcgtcggctgctcaccacattatggtgaagaggctggtgggttccatcggcggaaggctgatttgtgagctgccctgcctcttcgaaggcacgctcgggacaggcctctgacactttccgccggttcgcgattgagattccgagttcgtgcgtgaaacactgtttggcagagattgcgggagcctttgcgggaacagaaggatcggataggtatgcaaaacgctctgaaagctctgagtgcggccggagttgcggatggttgccggacgggttggctggagtggtgattatgataaaacgacactatgtacgtccctcttccgctccgcagcgcctctccagtgaattagtgaaaataaggcctcaccacttcaactcggcacgctcggctgcgttaaaatgtgttcgacagtcggtccggtcgctgtccggacgtctgtctgtccctcctttcgacgccgctcggctgtcctcgacttctcctccttccatgtgcatcgccagcagcggcgtcgaacaaaatggctttcaaaatcacatcagcgaaacccgttcagcttgctggcttagtcagccaaccgtcttctcctccgtggcggaaactcctaaactctgctgaatctcatgcgcccgctcagtcagagtcactcgagccctcactcactcagtcggtcgctcgctcgctcggtcaatcactggggtcttcgctcgggctctcctttgctgctgccgccgtcttccgagactgatggaacgcttcaagatgatggggctcggcgtcatcttgatccggagtgctctgctcgacatcatcgggaagtcgggagctagttcagtggaaaatgcgcaccgtcttcgattctcccggcatcgcgaatcgtatgagaggagaggtttccctgaaggatgtaatcaaaagctgtgggagcgcaggagtcagaaagtacacgtgtgtgtttgcctctcggctggatgggtttggagcgtttctgttttccggaggcagatacgttgagtgctctgagattgaggggctcatggcgatcggaatgggctgtgcattaattgcagtcgggaatcgagcgcgcatttccgactgcgtgaggtttgcgcgttttcagcgctgcctgaatcgaatcattgctaagtacggagcccgcggaaggtgcctcagctcgccctcctcggcaagactccggctgtcatatttgctctttgcgccaagttctgacgtagcacaaccccgatgggaaatccagctcggttgttccaacccggaacatctgaagctggaacgcatccatccgccgtcttatctttgccgagacgcaaaactttgacgtttccgacgacgtgagctctttgtaggactcgcgcgtgctcttagtcgacctgcctcattaggaggattttgaggtgagcttgttcacagccccgccagcggggcgagcgggcaggccgtcagtcactctgcgagcttttgttagtcgactctcattcgaccttctcagctacctcctcagtctgttgtcgagtctgtcccagcgaaggatctacacgatcgggggatccgacggaggaagctcctaattgcagttcgcgctgtcgcgctacggcgaggaatgggcgccctccttccgacgagtcctttcgttcctccgtagtccctgctcgaacggaaaggcaggaggccgcgcgcggtctcctttcgatggacgacgccgcgccgccacttcacgacgatgacgtcgacgaggccaaagtgcttcgagccagtttagcggaatgagagacgggatcgagaaagttcttcaggttcactgggctcgtgtcccttgggcgccgcgcagtcgaagcagcaggcgaacgatccagccaaccgaccgatgaacaagcaaagctgtcctgctcttcagctaactttcagagaatcgtcccgtccctccttcggcatcgcttcctcttccgcctccctcagctcgcgttcgcgccgatgttgttgacgctgccggcgacccttcgtgcggccaccacccccatccgacatcgtcgtcgttttcattgacacaagcctcgattgcggggtggcggcccgacgcggcaactttaaaacgaaattacttcttcgttcttgtcctcgctttttccgccgtctccgcgctccgtaattgctcgaggctggtgttttaagccgaaagcagttcttcttctcttgggcgggagccgacggccgcagcaacgataacaacaaaaaagaaacgtttctgacggccacggctgtgatcgctaatggggcagtcacttttgaatcacgtttcctcctgcgaaaaagtttgcggaacttcgcgcggaccgggttggaaacccaagttgagcgcctgccttggagaaactcgcgagaggacccttaagacgaaccgttcacacacgtctccgggggtactttccggagcctcaagccggagttctcctgctcgctcgagcgtggcgaaaatcgatatccgagcagtctctcagccgattctggacgagcggtttgaaccctgaccgtcgaaagtcgattctcgcgcggcgggatctccagaaacgtttgaatgtatccctatccaaataaataacaccgagtcatccgacgctctgagctgtcgtagtctgcaaaacgcttcgacagaccccagagagcgaaaaaagaacggagaaaaaacaacgtaggaacgagacggaccacgacagttcttcctgtgcgatgttattatgctgttaaatgagttggaaagaagtctgtaaggaacacatccagccagccagctcgtcaactggctgccgccgaccggcgaaggatccgagctgggggcggaatcctccctttcactgtcgtcttcaatcgcgatgcttcctctctcgggctgttgtcgactcggctcgctcgaactcgacccgacattgttggaggaggaaacgctgtaaagaagcttgtcgtggcccgaagcgcaccgtcagctgctctccaagcctttatattgccagagaccaccgtcgacgtcgcaatggagtttggacccttcgattcgagtccatgcagcgccagcgatttcgcgagcgccgacgctcacttactttcccccgcatttccctcagaattgagagcttgtgcaacgaacgaggatcttggcaacaatataaattccagcttgctctcgcgagatccgagatgaagacccgctccggttcggaaccatcagatatctgccgccaggggtgattcgggttcgagccgaggaggagaagaacgccttttgtaattagtcggagcgcacgatacgtcctccacggactccaccttgagcggagcaacgtgctggcacgtagttgccaccatggggccatgagcaggagttgaacgcgctggagaggacacacccagatagaactatggagtgagtcctgactgtttggatggtcggctcgattgttggattggtggctggtcgggctgctaccggctccaggaacgcgcgcagtccgtcactggagttgcttaggaaacgcgatcctatgagcgacgggtcatgtacacgagattgagcaaataacgtgcaaacgcgatgtattctgcttctgtgaacggtttgggttcgaggctgctcggtccgtctggtctgcgcatcctcactccgggtgcgtggatgtgtgtgtttgtggaaggcagaatcgcggccgtgtaaatagccgtttatggggacgtttcctggtcgggctgcctcgcgcccatcctggcaggcccgctccccgtgtttcccgccggcttgcttgcgagctcgtccatttttttagcctcgttctcctcctcatcatcatcgtcgtcgtcctctatgtcctcctgccgacgacaggtactctgggactactctggagatgagtgagccccgcgttctttacgagcggatacactgccgcactgccggccggaggaccggagtcccgagattcgtttcggaaacagtcgagaaaccaacacaccctgattgagccgcggagggaattcgttgggagttcggaagcatccggaactcgaatgatgacgaacgaatcgttgcgcaatcaaaatctttatcatggatattatggttcggtgcgggcgacgcatatttacagccggaatcgtattctattgcatatgggatgcaggcattaagtatctgagggaattctttgcacacagccctcgctcggcgattgttgctccgagggatcctcggcggctggctagctcgttccgaaagggctgtcgtcctcgttctcctcgctgagcctgaccgtcgagcctagactttctcctgatagttcaaccacgctcggcaagctcggccttaccacaacgctcactttgcgtgacgaggccgattggaccgatgtcgaactcgaggtcgaccgggccttcttgtcccgattccgctgcttgaagccgaggtagcagctggtcgaaagcaaagcaatccctaacggagcgagcagaacccccacgacgatcagtagatcggccccgaaaacggcgccaaacgccagcgttgtacctcccatactggatgttattaggccgaggcagagcagtagctgtcgaagagtttggctctgtgataggtctttctgcaagagtggacaatgaactctgttattccaaggattctgcagcttctgcgagagctggaagatttctccgaaaacttcgggcctcctcgtgatcttcgtcgtcggaatcaccaccgcgctctcgttgaacattcccgtccgccgccgatctcgggaaccgcctcagattcggagtatctgtcgaaagatggtcgaggtcgaggccgctgtggtgctacaagtgttccttagtgagaggcaaataggcggagcgagttggatccggcgtgtggagggcgtgtttcgggtgtttacacaacggacagagatcgaattacttcgcgtgcaacacgagccggctggcggagcccatcgaaacgaaacggcttcaaagtaaacgttccccacgaaattagaaatatctatcgccgcgatgttccgcgcacacagcccgtgggatgcggttccctgatccaaagcagatcgatcaaccgagatcgaaccgagaactagaccaacggtaactccgaaggctgctctgaggaaaggcgagaaccgatcgaggcggcgggtgggaatcgttccgcaatatctcgcgagaaacgtggcgcgattcgcagctctgcgcaagacccaagagctcgagtatcctggatcgaggggcttccgtgggaaatctgccagaaactaatgaggcggagagtgagctctgcggagcattgatttacctttagcaagtaggatcgttcgatgctattgtacatttcggttaactttcgctgcgacacaaattctcgtttcgtgtccgcttagcagacggctgcaacctgaagcggctcctccgcgaaagattcgagaaagaagcttctccacagcaacagcggaccacagtcagctcgacggtcaatagcgagtcgtgaggatgatcatggtcgctgtcaccgttgtgaaatctggacgctccgtggaaagcagggtctccggtctcgaagatatcaacttggatcgccggcgaatgacacaaccaagcgggcaacaaacgactcggcagcgcggggagccgaagggactccgctaaacgaacggcagccaactcccccgaaatgtcgccaaccgagacgacatcgactgttatggagattattgaggcgaacgcttgattgcgtcgcgcaactcggctaccggcgaccgcgaaccgaaaaacctgattacgagacgttcatagagcgattgcggcgaatctggcgggaagctcacagctgctatcacagtgatcgcgagaggtctaatcgctggagacactgacatccgcgagcggataaatagaccaccgaataattaggagctcgcctcgacgttggcaaattaaaattaatcaacggagagataacgaagactttgagaggagctgaacagctaatgaaaagcgcgtcgttaatctaaaggttgtcgctgccgtctttgtccgaatcaagaattgaaaaccacgctgccgttgtaacgacttgatggcaatgtgccttctcattagagcacgtacattcaggtgagcatggccccgacgacgagagttcgatgaacgggaataatcgagctggactgcagctccggaatcctccgccgatcgatgcgtccgccattattcacgaggactatcattgactgaagtgatggagaaattcagaatctgccgagactacttgcgccggagtcgaggtcgcatagaactcgacagtataatttgtatgaagatcaatgaacaacgttcgtgggcgctgtcgtcgtcgtctgatgtcacacaaaatgttatctcttccgcgagagcactccacgcacacacacacaggctccaggctggaattggatcaataaatgatggagtcttgagatctcgacatcatcaacaccggtccgatccgagttttgaaaacagaatatttcagacgaacttcgaagtgagcactggatatgagctcatgggttgactctcgttccggccacttgaagtatctacgaaagatcaacaaagacagcatctctgcgcaggtccttcggatacgaaacgcccccggtgtctggtattggtgaggaagatatttttcgcagagactctgcaaaaacctcgatcattgatgctgtctatctcttgggtaaatgcggcaagtgcgtgtggtcggggtcgctcggggtttattagtgctgctggatgtgctgtatctctgtttgggtagctcgccggccgcttgctaattgggttcggcggcgcgttctgtttcaatctagcaggacgagcgaggctgaagtttttcgggggatcgctccaacattcgatgccgtcgatctcgagtattaaaagcgccggagccctcgagccgccggcgaacaaacacgcctgagcagtgagagacgaagtttatcataactgggttcggcttatcttgccgctaccggaaaagctgttccaaccgcagcgttgtcagcgttattcaaatgttgcacgcgatgttcccgctgcttcgaagtcggacaaacaaatgaagattcagaaccagctaaccgagcgaaagacgtcgcgaaccggcggcgggcaacgcttcggatctcaggcagctgttcgcgttggctgcggaaactctccgatggagcactcgtcggggccgactatcaatttgatgcagcgcctcccgacgttgcctcgcaacaatcagagatcaatttcataagcgaatcgatgagggatctgttcagagcatcctcggaagtctctctggcgaccctgagcacccacgtactgcacagagttccggtggggatgatggaatcggcctcggagcgcactcttgaatgagtttgctgacagccggacgagaacgtaaaaagggataaagatcgagtagtcgtgggacggaggcggaaaagctgcagcagtgaacggcggaagcgagcgctcgcttcactcagccctgtatcggaaaatttccgaaactggagaggcgatcgtccaatatttgagagcggcgtcgatatcagaggtggctcgtgagggaccgactgaactggttagattaacagcggtgcggagcgaatgcggcgagtttcaatgagttctcgatatgcttgaataacaaacgctccgtttgaagtgtgcgaccacgcagcggggcgtcaatgtttacgacgacgacgacgacgaagaaactcttcgatattcaaaatctcaatcctgagcgtaagcgatccgacgttgctcctacttcggtgcttcagagagtggccgagaagacctcggcttaggcactcgacgaagcagacgagttcaacggaggaaggaaactccgcaggaaaggaagcaggaggggcacgggaggagggtccccgggtggggaaggagtcgttgtctttgtcgctgctgggaaaacaaaggagtcgctggatgcgacagagcccgagtcgacacaaaaggattatcgctgaaccaccagccaactgtttttctctcagccccgtcgtcgatggtggagacgctgttttggcatcgagcctactcactataataatgagcgctggcttccgaatgtttatttacactcaacaaaaatctggagttttcttctgccaacaacaaacagagacatccagtacactcgcccgaggcccactcgatcatcgtggactctccgaggactgtacacagctgggggataccttacggaggatatcaccgactccacactttgagagaagcggtgaaggggagcggaaatatcggagaagaattcttgctaagaagggggtttgatccacaggagattgtttgttttgcgctggtgcggtcaggtttgttttgccgccgccgccgccatcgtccttgttgccaggtatcggagaccagctctcgatcatctccggcactcggcttgaatggagcagcgaaaagaattgatgaagcccaagcgacacgaatctgagcgacgagagtggagaataggtcccggttgaaacttccagacgagtcctcctctgttttctcattaggagtgacgaagaagaatcggttagacatgacgcggctcccgatgtacttaacccgcttccaggacttcttggatcctcttcttcaagtctctcactgaaccttcgccgcctctgcccgaagccgtgctcattactggcaactgcaaacaatagactctggagtcccattggtttcatttccgtttgagacgtctccacctagaccaataccagcaactgctcctttctgtgaaattgttccaccgcgaacatggcctgactcgaacggtcggcgcagcgattgaggagctctcggaatgtcaaccgaactccgagaggaatcccgatcggactccagctgctgtctgcgaaaatatctcaagcgtgcggtagctttccattttcatgcgggcccacatccgtcaaaaaatagagggacctgttcccgaaacaaattcgggtcagtcaagtctacggagaaagagtcggagtggagaatatctcgatcgacgactttcgagggattcaggttgattttgaagttgttccatccatcaccatccagcagagttccctcttgctctcgaagaagaaaactctcgaggaactttctcgatttttttcccgaaagacggcccaaagtctagagtttcccccgccggtattcttcgcccatggtcctgtctgatttatttatatcacgagcttgttttccacgggtacttttggctcggacgaaatgtcaggggaaacattccttgccttgaggttggcagccctgcgatctcgaccagcgccttcgaagaataaaagatgagcgtccagttcgagcaaagcagcgtgggctcggcgagagtaaccctttcgttgggttatagacttttgtgtgggatgatgttaggagtggtcatgaataagtatgcaatgataatgaataaattcgagtttctcgattagctgcctgctcatccttgatttatctcgaggacccgatgcgataacgagcgccatctatccctctgtccgggatcgattatatctctgatgaggcgcggaccggggctggggcgaatagctgatcgattatgcccacaattgaccagatctcaaagtctcaaattcttctttccctctcgttacaggaatccaagaagcggcgaagagatatccaggtgagtagctcaactcaatcgtaggctccgaagaaggttcaccgcagcttcacagctcgggtacgctccttccctgttcgccgcgtccttccctgatgagacggattggggaatgtcactctcggattcagccgccgtgctcttgacggatctgctaaggagtttcctgagttcctcaaaatcatcacgagtcgtagcttatcgagtactggagttgttctaatagagtgtacacttatatcacccgtctgcttttcaccgagcgagcggtcgtgcacgtgtcgatacgtcttcctcctctttcctggtcgagagactgtgctatcctgtgcgctgccgtccgataccggccgcatcaaaaattcatattccaatctacggcttaatgaatgaagacaagagcaacgcttgggaggcaggcggacgagcagcaggacgagttcgatggacaaaattcaggatgatgagactggatagtgtattggaacgaacgtggaaaacgggagataaaggataaggagtcgacaggaaggacaactcccgagggacctttggacgtctcgtcggttggctgaacattgttatgcgtgtgctcaatgtgacttcacgcattgcaatgctctgttcaccgaaagcgtctttctcagcagatcccacagttctgtcactctcactccttgcactctgaccctggcttccccttctggccgcgacatgtctgcccttggttttttgttttcgatgtacttcgaagaaacatacgttgtcgttcactgctcagttcaatttttagggaaaccgaagacatgatttaggttcgaagagtctgctacgcgcgccgggagtgcaggcatgcttatcgataccaacctcctgctatatgtacgtagattcatctgtatcctgatacgattcctgtgctcggagagccgtaaccgctggtttgaccgggaatacggaggcaaaagggaggccgtggaacacgcaaacatcagaacactcatcagcgttagatcgaagctccttccctcggccttcttgcgttcctaatggaatgaggcgggctgttcaggagtgcaggttcgttagctcgctgaaactcataattgaagcgcaccaatccctgttggcagtcgccgctcgtttgcgtgaagccctgaaagtctagaaggcatggaaacttgctgaagatggcactagaagacgatggacaagttcagtcggacgagtgggcagggacgaggtaatgagagctcggagctcgggcgtctcttaacgaagttatggctctccacgagaactggttcacctgctcatctgactttgaaaggtgattattcgttcggcttgcataaaaactccgaacactcgagaggatatttttcaatttttaagcagacgcagcagcggcgagtcccgctctggctttcatggacactcactcaccctccggcttttactttgtgagcgcgactccgagacgcatgccatgccaacgaaaccatcatatgataaaaactctctctgtttcgccggcttgggctctagttgctccgctctcgtttttttgctgctcggacagtccttgcctctcgaaggtgcagcggcagggcaagaagtcatcccctgctcctaccgcgacaaaggaaaagagcgaaaaacgaagagaggctgaataagggaaccgaactcggatgtaaaacggactcagggaagccgagagttctgatgaatattgaaggagagatcgtaagaaaggctggcagagagtgagctaggaaaggaaccatgaacgaggaagttggtcacaaagagtgaaagtagaggaaacagagaaatgggggccgcgttgaatcatgaaggttcgtgacgagcgagaattgatgagctgaacaggacgaactgtgcctgacatcgacgacggaataatgagctcagccctcaatcaacgtcagaagagagcattctagagaatttcatcttcattctctgggagccctacaggacgcgagcgtgggacgacgccagcgagcgcgcatcgagttcgactgataatcaggcgatgatcatcgtcgcgcgatctatcacgatcagagctgtgcgccgcgccgtagatacctcggcggtgcgcgacgtcggcgcccggtcttccgatcgagcgtcacgagtgtcgaagcttggtcctagtaacggagcgcaatcagacaagcacggaaacctctgatgaacagaccacagcatccggagactcttctcaccgcggtgagccggaatccatctgaagcggtatcctgcgtagtcgaccgctatcctgcgttgagagagaaactcagtaaaatgcgcaacgctggagagaaaagaacaaggctcttcaatagtggtgggggattgcaaccataatcccaagcgtatcagaattggtgcgtgatgtgcttttcttagcggcgacatgagcagagccaggaaaagggaacttttcagccgggagcgtttcgcgcggaaagcgctgctgaatggaagctccacgatgcctggaatcctggtcattcacggtggaggaagctccagtagatggttggctctcaacctcagatacaatatgaaacctgtgttcggtcttgggagatttttccagtttcatatctggaatagacatattccacacccagccttcattacttcagaggacgaaagaaattcagagatgacttccgtgatttttgtccgctggagcacagaagtcttcaagcgacgaatgggctcaatccactaaccattgcctttaagccgtcgaaatcctcacggcgcacagctttgatcacgattcgaatgtggctcatccgagtcgtcggaagttctcaaagctccatcgcggatacatcgttgacctatcatgcccatgatcatatctatatcggctgacagttccctttccgaatttagaacgagaatctcgcgtctctcggccccgctgttatctgaaattattttcgtgtcccttgccgctgccccgcccggttcgatccgccgtctgtgtagacgcctcgggcggtgctcaaaaattcatcagtggaaccgtcgtgccgacacgatgtgaggaagacaactccaccgtcctgtgatgatgacgacggcgaccccagacgccaccggggaaatgcccgattttccagggaaaaggtttcggcgagaaaatgcttctgagttgggatagctccgagcacatcgagtccgaagcttaggcttcctcgatttccggcctgcctcctttcggctcatttgagcttcctgttgccgtgtgggcgaataatctgtggccgaagtggatggtcttgagttaaatagaggaagggccgatggacggacagcggaacgacaaatttcgcgctgtgacttgtcgcggacagaagccagtgagcaaaccgagctagtttggcaagcaggccggcctcacagacccgcagtccggcaacgcggcccaaatcatgatagatgacttagctcatcttttcccagtcgagcttttatcacccgacagcccgttcgtccatctatccacgaacgacgggccgccctacgtccggctggacaagcagcacttcgagcatgatgcacccaactaccgtggacagcactgcaaacatcagggacgtcaccgacacccctgcgaccgaaagatgcttagacgacgttcgtcgccgtcgtcgccgccgccgccgttgaacctcgaaagaaaccattcctatatcctgcgaatgaaacagtaccgcggttttcgtttccgatgtccatctgggcgtggtcggaaccggagccgagcctccttgaattcctcctcgcagaggagaaagaggagaccgatatcggttccaacgctaagacgatgattcaggaatgcgagcttcggcgacggcaggttcaaagggtcgggcgataagtagatgaagaaccaagggaggcaggaaagcggataaataatggaaaaaggaacagacagagacacgggccgactcttgcctcctatcagtccacatcccagtaggaactctcccgacgctcgttccgaagttgattcctcgttcggcgttcacggaccgagcgcagtgcgatctccatagctttccagcatccacgaatcaaagaacggaatatttctccctcattcgtcgcgtcccccgcctgagaacctcctgcatttctacgtccgtgtcctcctcgcatcctcaccccttgttcctctctctctctctctcagcggcacgctctctcgtgtcttcctcacgcttctccttccggtttcctatctcatttgttcgcgtacgctcgtgctcggtgtcccacggcacagagcacatctctcctcaatccgcctttcggtgctctcctcgaagttcgtcgaggtgatctcctcccgactattcctcgctccttcccaccctcctcgctcccgactgctcgatgtagatttgatttgtggaaagctcattctggctcgagtattcttcacttcgagtatttttcgttgtcgttgtcatcgtcgtcgtcaggagcaatggcggagccagtcgcaagatgaaaatggcgccgaggccgccatctctatctcgcgttggcagcggtgcacggaggtgttaatttttcattttttcgcgctcctcctcgcaaacacaagactcctcgcagttttcctcacagctctccccgtgagcgatctctcatttcggaagcaataaagggaagcctttgtcaagcggaatcacggatcgcgcttgatcttcaccgagcgcggcagctgccggctcatctgtctgtgccgctacactgctgtctatcgggcgctcagcatacgccgacaattcgtccgaggtatggctcggccgagcacgtgagcccgctatttccaatttggacggggttcccatccaggattcttccgtgctcgcggaagaaaagtgaaccaatcaaactaacaaggcagcgagcgagcggtgggaaaacttcggctcgaggctatggcatctcggatcgagtgaagtccttgtggacgatgatggaatatacagggaagggaacgtcccgatgaggcggttcttgtgatctcgggctgaaaactcgacctgtgaaaactcggtcatccaacgagttgacctggaattaagtcctggaccctgttggttacgcggtcataaacttggctgtcggacacgtgtcctactcgaggggagcagctccgcacagacccttaaaaaggagttagccgggaatttctacacctcttttccgggacggacgttaactgtcggcctcgttactgcgtccactgcggcgttcaaggttgcgtcttaatccaggattccgatcaggacgcggcgttcggggtctgtttgggatcgcggtcgcgtcgagcgtggaactcgcctcacgctcggattgttctgttcgttgcaacctgtcgtcagaaatgttggtcgttggccctggtctcgactgtttcataattgctttgcattccgctgcagccagaagggagggaaaagcacctgaacggaggagcgatgaggaaatagcaagcacggagtccaaatccaagcgatcacaccaagcgagcgaggggcctcctcggacgccgggggccaaggacgaaaacggccgagcccaccgcccgcgccgtcgttgccatcacaccgtttcacgtcggagcaccgccgagcaacgcgaaggaaagctcagccgagcaaagcacaaccgcaagcggcacgaccgttgcggctgcggacgaggaggacgaggtataatttcccacgagggcagtctccttctccttggatgcttacttcgttcggcctccccctcccgcggtcgctcgttggtaggcggcttgcttgcggccatcccatgcccagaaacaaataaagcgaaattaattctcggcttgaagcggagaagccagcgatcgtccgcggggccgtcgaccctccagccgagggcgtctccgatcgtcccagacaatctgaggtcgtagttcagattgattcgagtcggatccgaatcaccgcccctacgagccaactcgaaccgtggtctgatccgcaccagaacccacctccaaatcgagttaacatctgcgggggggcatacaggcgactcggggtcgaggtcacagagtggaagcgaagacgaacacacggaggtgctcggaggaagaggagagcaagcgattgaggtgatcgttggactattccgattattttgatttgattcggaagctcatgtcagggttggagtctcaatcggagttccctccctcgctccacccaaccggctgggagctccacggttggcgagtccaactgttcaaaccttcacgggccattgtgctccgagtggcttccgattgaggacagggagtcgtttgaaacaaaacattccagaccattcgacgcctccgctacaggcttccatgggaacctcaaattggtggagagaatgttcaatgtggagcgtgtcgacctccccgtgttaccaatcgagcgggacgtgaggctgaccccgccccaggagtcaagcgctgtaaggattgtgtgaggaacccgccgaatcaactctacggctgcgatgtctcctcttccgtcgttccggggagctctgggcagacctcccggagcgatcggagatgaaaacttgagcaggctcgccacctgatgtatcgacctgattcgttgacagatcacggatgatccatgatggaaatgagagattgcccgagacaagggaccgctctgccaggaactcgagggagcttcccatccaggcgcgtttcgtccgctgcggggcggcgctggcagcattggggaaaagcccactaactaactcataccccgatgctcgttcgatgccagctggcgcgacctctcggcttctctgagagccagatgttggatcatttatcgattcggcttgttctcctcccttcgaacgaggcgggccggaagaatcgagagcttttttcctcgccgctcgctcctcatccgccggggccgcacggagatatggcccggaagcccccagcaatcacccgccgagtcaatactcgctcgttccccggcgtttcgctctatttttctccgaacgtcttccccaccatcgcagtccatatggaagcgggcaggagtggctctcgtgcgaagcatcacttctctttcagccacgcacaaacacggcgcacgccgcatacgttgctcgctacggaagaccgaagtgaaagctcctcgacgctcccgacttcagctcggtcgaggagcgaaactcgcgttctgaacgaggccgctattcaattttcccgccattggcattgtttgcgtcgcgtcatgaaaagcagtgagctcgaggcgctgccgtttgtgcggtatacacaaaaatcgacgtactttgcctgtccagaacgaggcccgttccaacggcgaattctcggtggcgtgactcctccacctcttgcttctgctgttcctctgctctccgttcgagctccgtcccggtgcgcctagcaactcggggcgctgaccgaggccctctgagtccttctcagtcatttctacttgctgcttcatacgacgacttcaagtacaaggtgccgatccaaggaagtcgcgctggaagaaggcggttttccacatgacggagggccgcggaacggggcccgaactcggcgaaataataagacgccgagaggggaagagggctgagatcaggagagaagggcgacggcatctcaagtcagaaccgtgtcgccgtcaatcgactacgtgcatagccatgtgggaatctgcctttcaaatgaagtgcgttactttcggatgctcgttcgtctctcagtgccttaactcccctcctcttcccccctgtccgagctatgacctgtatactcgtgctgtggcgagtgaacactgtgtgaatttgacgaatttgcatcggacccgagcccctggagctcttcggtgtgaggggtggatgcgtctcaacatccgactctgccggtgccactcgctcgactggtgggagccagttctgataacacgcattcggcgggacactcccggatccgacggaacggtagcgcagcgaacaaacagcagaagggaaatctctgcgggaactccccagaattttcagcagacacgtttcgacgtatattcgaggatttccagagagacgcaatgattaatgtagaagaggactggacttcaatctgatcgaaacagtttccgataaggacaatcgcagtgttggatggagtaggaggagcacttcggctgcactggagtctgtttgagtctcgatccgctctcagcctgccggcccgtatctctaaccgcctccaatttttcctcggaacgcacaaacttcgcgttatgccgttaaacgaaaaacagtgcttcgcatttcgtctcgattgcctggctcttaatatcgagtgagggagttgagttgctccgattcgttgttgcatggagggtcgacgtcacgtagaatgaggctgtggctcgcaatgggggcccattaccgcactgctgctcgcagctccgagaagggttcgttatcctcgagcacgagtcggtacgccgggcatcaaatttcgtcgccgtcggagcaccggtggtagacggctggatcgatgctttgggcgattgtttgggaatgaatggcaaggaactttattccatttagattcttcccacggaacaattttcacgccagacggaacagtcttcaatagcgttacgacctgattggaggcatttgcggcagaactggttgacacctatccaaagcccgagctggttactttttagcgcctctgagtaaccgccgtacagccccgtgacgatgtatccctccacttctctctctttcttcagagcttccgaggaaagatcggaacatcagaaagctgcatgcatcgcagcattgtttcctggcggctgccttgcggtatatgttctgggttgacgacgtgcgggtgttggagcgggacaattttcgccggcttttcgagctgcctgggtgtccccgacgtactcgtgcaacggaggagtgagtccgattaaaaggtcagaaacttggacgcactcagctgtacgactgcggttgaaacgaccgacaagcccacacctatttgaggaggacgaggaatggatcgagcgaccgagaggaacgggttctgagcgaggaggtgcagagagatgatcacgatgaggaccagatagggattggagagagagtgaagaggaatcagaaattcaagagggtaatcagaacgtcggctaatcggggagtcacgaggacggtcagggggtcaggagtggatcgaggatgagttcactgactcttagaagtaggctcaagagaggatcttgaacgggagtcgggacgaggtcaggggaatcgaggaagatcaaggatgcagcgagcaggatctgatgaggggggggggcaccggcgggcagagcgcggaggggtgaccgagaggggcgggaagagggaggtattgctgaaacgtggctgactgacgagcgagggatctcttagtatgaacattcctttgctcatgagctcctttgatctgcggcggcggcgagtgctgtattttgcgcagaaggaagatggaattgtgcgtaaagagagcgaacgaacggagcgacagtcgacggggaatgcgagtgcttagatgatttccgggacgtggtgtcacgccaaggacacctccatctttacgctcgcccttcgttcctccacatctgcgtatgaactcctgagagaaaagacttctgaaaactcatttggagaaacagacgagccgacacacaatgagccgcgttgggacacagcgagacggtggagcggggaaaactcggaacggactcgactgcagaatttttgagagtgaaatttttcaataacacgttgaaggagatgaccgagtggaggacgtgagctgcttctccaagatattcgtcgatcctccgacgtccccgcagactgccccatggcttccacagcgagctatgattactgatgcacgtcctcacatacgcggtctttgaaagcgcgcacgcgcgtgcccccgtcagtcagcttcctgatctatttatcctctcattcgattattcgactcgcataaacgaattcttgcttccacaccgtcgagcttgagcgctgcgtagcggatgaatttcacctatcaaacggagcttgaggaagaagtagtgcttgtacgggctcacatttgtcgttcagctcatccactcgggaaggatctctactcggcgactggatatcatccatattcgtggcaactatctcagtgaggcattcgatgaaacaaacgcccccattgcaaggtcagaaacagagaaatcgaggttacgaaaatctgtgggaaatcggtgaaattcacggttcgggaaaacagcttcccccgctccctcgcggccctcacaatcgaaatactcactaacttgtcagcttcacgcgacggtaggacacgattctcacgccactctgcggaatgagcttcccaagctttgtttcatgcttgaatatcggatctcaagtcgtcgtgagggctggaacatgctctacttcgagcaaagatgctcgaaagctatttttaggattgctctcaactcaagaaacctgagttggtcaacaaaccctgccggtcatctgtctcggcggaatctccccctttgcgctgtagcaagctaattgattcgaaatccgtcgcagtcttgttcgagtcattttgtcgtgtttgctctgatcgctattttcccggcgaatagggcaagcccagtgattggagaaaatgagttatttatgaattttccaatgattcatccgcggacgaatatcctgagcgaaacagaataccgagtgggatttttgcgggtgcttcgatacgtggtcccgtttgctactagcaaacgttccctagaggcctaggaaattgtccttttacggatgaaatcaggaattaaggcttgaaatccgagtcatcgactctctcgttcagcggcgaatccatccatgcatgcgagtggctgcgtttgtcaactcggcccttctagggataggcgcaagcaaatcctcgtggtgttgccgcgccagaagcgcggagagcttttgagaattcagtttctcgacagactcgcttgcctcacagactgactgactgactgcccgtcccgcgccgtatgcctgctcgtcggccgatgcatactgacaagtcgcaaagtgcgccctgagcgaatgagagcgcacgacttgtctgtaactgtgtatctcgcccgggctctccctgtgaggctcctatccccgccccctcccccatctccgccttccgtcacaggcggggcaagactgctgctactctcggttcgcctcgaacgtacgggctgagctttgcgaaagaacgtcgtctacggagattggaacatacgctgaggagaaaaactatcaggctctcgccctggcgcgcgctcgtttgctccgataggcgggatttttccaagggaagatccgattcaatctatgacggctctgtcgtcgaagcctccgtgtcggcctcccgcccgttttcctggtctgttcgtctccctgtttgttcggttgcgccttcccttctgtcgaacccatcctcaagacggttatcctcgccccaatcataacgcggaccgctcgccaaagcgttcgtcttgccaaccaccccgcaaatgagtcgacgagtcggcttgcggcaatatctcattgaggtcgacctcgacgcctcgccactttccgtcacccgcccgaacgcgattctcgctgcactcccttttcctgtttccgttgtcgacgatagcgctcctcaactgagaaatatccagcggcgtacttgagggaagggctccaccacgaggaccatgatcgtcttcagttgcgccaagatggtgtaaaaacgccaatgccgcggccttacgaaaactcacaatttttagaagaatggtttctggccctggaatacgtcgtgaacgtcatgcacgacttggagaggaaaagtgacagtggctgagttttccaacgcgcgactagatggaaaggacgtgagctaggagtcgcagtcaagttagtgcagaatttcatagtaaccgcggccggaaaccctcacgacgcttggtttaccctccttgaaatcgctctcgaaactcctcagggaaaaacagggtgggctcggctccctctgatcgtccctgagacttcactgtgtggccttgctgcaatgatttggacaaacgagaatctatcggaaacgtcgtcgtgcctcagctgctgccataaatcagaaaataagcttttgtggtcgttccgataaagctgtcgcgtggctccggcggagcccgacagcacgactccaaaggctgccggcgacggcagacctttttgatgatagtccgctgcacggagccgaaaagaatcctcaaagataacgcaggacagaacgaacactttatgcgtccgcgttccggtgtcgccgtcctcccctaaacaccgtttagccccccggaccatgagcgctttgttcgccccggcatctcgtttgacgttcccgcttttggcctctggtcgctttccagcatcctattttttgttccctccgtctcgccgtcgtcctcctccgccgcttcgtccttcccggccccgagctctccgaaaataacatggacacgctcagatgcgtccgagattaaaattttgcgcaacccgcccaatcgggtttagcgagcaagcgctcggaacgatgttcgcatgcgagccgagagatttatttctccgagcgacaacaggtacaagggcaataatgacggaacaagcagcgtgacaaggacatcgcaagaagcggagaacaaggaaaatttcgaatcggagcctgttcgggctcggttttcacgcgtgggttgactctttggcgcaggttctgcgaatcattgattgttactgggcatcgaatggaaggatcgttctttcaacccaatacatgatgattcaccgaaagatggagcgaaccgtgtctgagatggagggattgatgagcaggaaccttgagggtgcatccaacaccacgctcccacgtgtttgcttccttggaacccgcgttcaagcgcaggcacgctttcgagacaatcagcattttcacaacgaagaagccatctcgcgccggcctggtgtcgtgccaaccagctttgtagcccctgggtcgcatggtcgcgtagattcataatagctcgccgtagagaactgctattggcgggttgatagcatttggatagatgggttgattgatggatgagttgatggatggctttttttcctgaaaaagacgatcgatggatgattgttcgggaccagggtgcagaaggatgagcggatgtaagacgcttagattgcgagacggcgagcctatgccgtgtcatattcctacatctaataagccgtcagatcatatctaacagggatcgggaaacttgtcgtatgtttgacattaatattgagttcgcctttcgcccgattcgttggcgtatcagcgtttccatcactctcccagcctgactgtccgtctgatccctcgctcgacatccgtccgacattaccgttcgtttgcccagtcagttagttatttgggagtcaagtcagcgggacgtgtcttccacgttcgctgcaccgggtctctgtccacaaaaacactgctgcccccgcagccgctgggttccaggccgatgccctcccccacggaaaaagtcagcttgtctgttatggtatattgtctcgacgcttcatcatgttccgttggctgacagcctggctgccgctcgtttgctttgcgctgtcaacagaggaaagaccgccgtcgagacgacacgcagtcgggcgaaagcgactttggcgcgattaactctccacgagtttgttttcgactcctactctccgcccagtgggccgcccgggtctctctttcgatctcagaacggtctttcccttccttcgagacatgcttgaggcgcgtcattgtcgctccggaggcagcgtccaagtgctttgttggtacttttctttatattctgtggggctggatgcgccatattcgacggtttcgacagcctcgcgaacaacaatcgcatcgcggcttcgatcacgaattctgtttgaccgattgcaaactcgttccgagctcgccggagtgcgcgaatccgaacgaggagggaggaattatcagtaggaaaacgccgacgagggcacacatcacggcgtcctccggacggcgatcgctgaaactacgtctgcatctttcatgagctaattgttgccgactcatcgtgggagacgtcacgctcgcaaatcatgttccctgcgaaagcaacagcagctgtactatgcgagctcggaggttctgcttcgttagcgcatattcatcacaacgagagctcaacgaggatcaacgactataactcctcatcggtgtggatacggggaatgccagaagagaaatcttcgaatcttcttgacgagtttgcgttcgttcattgttggcgatggtggtgaacgatggagctcgggagcttttgggctgttggcgcgagttttgaagcgtgacacacccgttgtcgattgcaacgtgagaggaatgttggagcgctgactgagtgttgcggcttccggaatgacggaaagacaatgcctcgagccatgtagccgactcgccagctggagcgaggaattccagtttccattgcaagttctccattgttccgttggacgaggtttcgactctcggcgtatttacgagcaagcttccgtgagggcagatgtcgctctcgggcgaactggagtcggttcacgccactctttcgccgttcggacggagctgatttccacagctcccggactagggcccgcacatcctccgcctgggtgccatcttaggtggcgcatagggagcgccttccctgacttccttgtggatggctgaacggtgactgactctatcggcgactccctcctccaacttggccacgaactgcacttggcaatcgaatcaaatctccaacagaagcaatccctctgtcgtttcggacaaagtttccgcagcaagaacttttgcgggtggctctcctctccgacgcccctccattcttcccttgagaacattgttcctccatccgaatcaagcttttctctgcttcctcagcaactgaaattacctcgatttccgaggggtagcgttatcggagtgagcacgcagcgcatcctccaggtcgcgtcgttagcaacgatcgggacctgcaagaataggggggacccgcttgtggacagctcggccagagttggatctcccgaccgaactcccacaaggacgtcgttctcttttcaccgctccgctgtagcatgtgtgaccttccgacaaagtcggggacgctgccggacgggaagcgctcatccggtcgacatggagctccgatgcatcgctgaagtcgacccgcaggcgaattcctcgatatcgattccgcgaaggaacttctgaacggcaggactctcgtttcgcctatcgtcacctcgcacagatgggatatcattttgtgacgaggttcatatttcacgcgtccagggtcagtctcaagaagatttggttgtttgccaatgtacttcagacacgactcagattcatcaggcgctcatagattgtgaatctagatgaatcgctgcgcttactcctgagtcgtgaaaacggcccactccgagacctcaacttcaggctagaaacatcatgtcagctcagtggatggagctccaggatggggtttcgagctccacgagattggcaggttctccatctgatagcggcatgttctgatctgcctgctgcattccgaccctcaaacagccgaacaggttgaatattcacggaggatgccgttgctgtcaggttttttccagaactcgtattgcaaaggacatatgacccttgaaaagtgtgactcgagaacaagaatccggatggcgccgcttttcgaggagcaaacgtcgtgaaatgagacactgtgggcaaagctctgtgctccattgtcgttcgacgaagttggcgaccgataactttcactcctgcagtgatgatgatcatgcgggcggcgctgagaaccaaatgcgaatggtgcgcagaaagatcgctagttggctcgggcgcgaacggcgctcgtggcctgaatgtctccacggagtggcgccaagccggaattgatgccgtcggcggtggttctcgattcgtgcgctgtgccgcacacagatggtctttctcagagcaggcggcatcgactcagcgacctttacacgattctcgaacgtgagttggcgcttgatgcgagtccaagcgtccacgggatgtttggaccgagtttcgttccggatccgacacgtcggagagtccccaaggtggactggttcagaatgtccgcgtgcctgtcgttcctccgtcggtgatcttcggtgagaagtgttcgcccgtacgactacccgaatcacggaacctttagatattcgtttggtgagcgacaaactcacaagcttcgtgactggcgaacccttcccggatccgagggtgaaaaacgcgcgtgaaaaattcgatctctatcatgaaactcgatctcgacctcagttcagaagtcctcgacgcacgagatgatcgtagagagcatgaaatcattggagcggcgacacatagttccaatcgtttctccgagaacggatgggagcgttgttcgtgggctgttccggaggaacgagattttcgttctgatttttcttactttagacccgctagcttgtcggcggctcgcgcccgcggcgcaaacctccctcgatctcggaacgcggagatcgcgtgacttttgcacaagtgaaaatttaatatcactacgaacgccctccgagccctgagcgagttcacaggcccaccagcgcgtgcggggacgagggctctcgacttatgggcgttcgcggtgatcgcaacccgggcggggacctaccgtatatcgaatcatcgacatgcccggtcatgtgcggtcagcctcttatgcacagacacattgtgttccatttgacggaagagattgcttccgttagggggcgctccattctcgatgaacacgcacacgttgcaacggagagctcactgttcccgtgcaaattcattacgagcgttttttccctgtcgccgggaacctgaccctctttgctgcttttgctctcttgctggcgacgcagcagccgcaaccccgatattacaaaaaccactctgctatgctgttctgaagtggggtgtgttcctgatcatcgtcgcagaggaggattgtaaggcgtgaaggaatgagcttcccgaccggaacggtgtattccagacgtactcaatcagaacgagatctgcacagcacaatcaacactgatcgattgtcgaatcgaccgcggtcattcattattcatggttggatccctgacgtattcctttgcgttttcgttccgccggaagctggccattcgttacactagcggaatctcagacaaagttcgactcaaactctcaaaacatacctatccacaggcattatcgaccaaatagcggctctgcctggtttccttccgaagttcgtatgaatcacagaagctgatgcgtacgatgattgacctctagaagaggttttgtaggcagagacaggcaccagtccaatgaaagtcgcaacgttcgtgttttgcatctgctcagcccgcccaagtcctctcaccagttcactatcgctcctcgaggcagagagggaacgactgcggaaataccccgagattgacttgaaatatttttgaatctttccaggtgcttcgtcggagaaagaattcaagttgatacgtgaggaacgcagtcactgatacctatccgatcagtccttcttcacctttacacctcgacagccaccaagttaccgccatcttatcctaccttaactcctgtggtcaaaccttatccagatcccacccgactaatcagtgatggctgccttcattgcaaagcagatgatgggcaatcagctcaatgccgtcaaaggtaagtagtgaatactggatgcagaactcccctctctagctcgacctctggggatccgaagccgacgagtttgctgattagcaagtcaacatcgagagccagatccgcactctagcgttttcggtacatcgacggctcagtctgtcggttcgttggtcgttccgacgatttctgcgcgaaacagaagcagcgaaggcccgtaggggttgaacgttgtgctccggtatcttgtggccgctgctgggctgtaacgatcagctcgccaactggggtaccagaaaggaaaagatacagaattttcagcaccctccaagtagcatgacgctgggtcgaatctcttgattagacccccatggctctactgcgccaggacgtcgtccagcgagctctttgctcacattcgcagatagagattcttccggctcgtggctgggcacgcacatgtacccaccgacgcacgaaaaaacggaggatccgtcggggacaggaccgccagcaagcagattgacgcggaaacgcagggtggcgctcagacgcactaacttgcagaagacagacaaacggacaggaagacgtgcagcgtgcacgaacacacacacacacatagtatatacatcaaacggaccctccccgtcgactgtccgtaaacagagcaatgagacgagctccccgagtagtagctcggcgctgcccgtcccgcttgtagcccttatttacttaacaaaatacgccagctcattggttggttggccgggcagctgggccgccagaactcgccaaagcagctctgcttgaaacgtgtttcgaatccttaaagtggtccgagtcccatccagctctcgtccttcgctcgggcggtcgagcgcacagagaggcagcggtcgagtatcgacgggctcgagcccatgtttatgtgcaggccccggttcgcctctctcgcgatttcttgctctgacgcggttatcgttgcctgctgtgtctcccctcggccacgactgtcgctccggtcgatgtcggtttggttgcttcggtagacgaccacgataacccattgctcgttagagctttgtggccaatacaaatgcggcccaccctcgaacgggaacaggctactggtttcacttgccgcgccgttatatcgcggaccgagggatcgaccgacgacggcgcagacctccgccggggactccggctccgagcagggcctgcctcaatgcctgctcggaggctcaaccgcgggtacgtctacgacggcagggcaaatggagcggtggcgtgtctgggtttgcccaccacccagggttagattgtacttcgacacgcagttgtcgttatgggcccggggcgaggtggacgccaacgatgttcggacgagaggagtgaaacgaacgggagaccgaccgtttgagagagtggatgggcgcggggaaagcagcgaaccgctttaacgacagcgaactactgctgcgtcgacgcgacaacttgcggtctgcatcgggactcatttccgtggaccacgtttgctctacggctggaggacgagcttttccctctgggttttcccactcggccgtcaccccacatgggtcgaccgaagtatacttgacagcgtcatgtcacccgccgaggactcttcccgcgagccaaaacaaacacaggaacgaatatataccgcgacagagactccgctatcgcatctacccggtaatagacaaattgaccgagtgacgactgcatggcagcctgtccctcgcttttcctgcccatcggtctcggaggaaggctatcgttgacggatccgggggagtcgttgtggccgacgaccgcgctggggatccaaacccgctctcagtgaagctgcctcgcaacagcagcgacacatcaacaatcacgacgtggacctcagttgagcgaattacaggaaaaatgtactcattgtgtgtccgcgggagacacgcgcaacaccgccatgcgaggctaatgcaggtgcccggcctattggtgggcttgcccttgtgagcaaatggcccgcttgcgtggttgcctcgtataaagatcacaccgggtgaatttcgtctatcataacaagtttccatcgaagccggctcggcagacagccgaaccgagtagaggcaagccggggacgactcggtcggcggtgggacgagaggacggaaggcctggcggctccagtcagtctggcgtctgggctcttcagtgagttgccggcacgcagacggacaggctggcaggcgcaaagacggctgcagtggagcactgtgagctccgttcagttagacattcagccgccgggtttaacgttgcgcgttttttcatgacacgatcgtttcccgcggatctcgtcctcccggatgcgtcttgataaggctcgccgttcttcggttggcctcctgtaatgatttcctatttctccaaactgtcgcccgtcctcacgaggatacctcgccacctccgacagggccatccccgctgtgcgcgatcagcattatggtttctgacatttccggcttctgtgtgcggttccgggttctcgagccggccctcgaaaaataatctccgcccacacacgtctcgtccaactgattgcttcttcattctatcaccgatattcctatcgctagctccctccggcatgaagctcggcctgagataccggattgaaacatagctgattgtaaatccggcagagaatttgatgtaccgtgtctatcgtattcgaagcgggcggtggactgaagcgttagcgctcgaaagcccacgccctgacatccagcccggatggagttcaggacccgatttcggagtttgcgtcgcccacacgaagatggcgttccgcgctgggtttccggggcctcctgcgccaggcaatggaggagcattcatcgctgtcacctgctcgaagctcctccatctgggagagttcgttcaattgagagaacctcacacatctccgatttcgcttctgaagccggccctgctccatacgggtcctgcccggaggaaggagaacgaacggaggaacgacggaaccgagggatgtggagtaggaacacggtagctttggctgtctggagcggcgaagccagtttcgcgaagcaatcactaccatggcccaggaagcacccgcaactaaaaactgccgactgtcgacacaaattgggacagttagaacaatgtcacctaagacgacagcggtggcatcagcagacggactccgttgacgttaagacaaaaagagaacgccatgttcttcgcccagacttgatagattgggtgtatgctgcattgaaaaagcggctccaattgtaccaccggtccttcccctaaaaacgactctgcagaggacgttctgtggtctgtgtctgactgtcgggctgtcagtgggcatgctgagtctgtctccgagtccatctgtgggtgcagagacctcgttcgaccgctcctccgatttattctcgctcgattggcagcttggtcaatggctgttccgaatgggacttcaagcgaaaacagcggagtctgcccccggaacagaaccggcgaccgaatctctggcaccccaataagccgggagatcggctccatcggggcggacgtcgcaaacgacggcgacgggatgactacggcggcggcggttccggcgtccccgctcacctggccacgttctctcgtcgcgccgtaaatactggaggagccctcgctctgctggagctgcagttgagcctgcagcagccctaattgaatccgaaggtcaagtgttgagtgcctggcgttcatgaactgggtcggcagacggccattcgccatcaagtgccaactggcgcgtcttcgcgttaaacgccgacttcagcctcccgccaggaacagcgtcgatttggctatgagagccttcgcgcctccgcactcgaggcacagaacgcgctgggggagcatagtgttgagacacatcgatggggttgaagacacgaggaaggaaacgataacgaaccgtgaggaacatgggagaatttcttgaataaacgcaggggaaactcagccgtgtcagagctctcgcgtttcccgtctgcatgacgcagaccttcaattttcctcactccaaccccttttcgcagtcctccaacattcatcggcgcctccctcctctttttccccatcctctacggtcctcatcctctggccctgtttttccccgggtttgtttcctcgctgctacaagatccgttgccaagagccagtgcgtattcccttgtgtgcaattattatctgaaaaatgagagcctgtcggacgaacgggctcgctcgctggactcttaatctgccacccagccgagcgagcaagcaaacggtcgagtaagtcagtcagacagacagttcagcctagggctcatgtctctccaaggagcaagaggaaatgaaagagagcgcagaacgaccaaacaaattgaagttcctacacgccaagaatgcaaactgtgctccttgttcttacgtcttgccgctcccatctaatggacgaatcttgttatgaaataacgctctggtcagctcaactccgctcccatctcacagctgctctttctttaagcctgtttggcttttcgactttgagctctgttaagtgcaacgcctacgcccatcgcgggaaacccccgacgctcctcctgaggcactcgctctcaaccattcgaaaccagccctcgatgggaaaatcagagtcagccccgcgcggccctgaaacccttggaatcacctcgactttctcgtcttatcagccgttgaggggtctcgccgcgcttttgacgcccagttttgcgaaaatcgttggaatgaaaatcatcatagaggtcacagtcatctcggaagtccatgaaaccacgatgaggacatttcgtgtgaggctgccttttttttcttgggcgcggcataattctccattcacgactgcgtccaagtggctcctccggggctcgttgaaacttgcttccatcaggtcagcatcagccgccgccgctggtccctatccggaagtgtttgagcaaggaaaaagaggatctctttttgacgacggaatttcccttcgaaagcaacttcgagattagaacattctcccccccccccagctccctgctgccccgctcgttccactgcccgcagcggtcctctccccgaaattcccccgtcgtcccgccagctggcaagcccgccagccaaccaaccaaccgacaacctcctccgctgacaacttacagaacactcggatctgttccgaaactgggatcgcgggcaacagatcttcgctgctgggaatctcgcttttactcttttccctccagatgttgtgagtttctcccgcgtcgtcgtcgtctctctcgtcatggtgaaatcttttaaggagaccggttattcctggtacggaagcctcgagcaacgacgacgagagtttcaacaaccggggaaatgaaggcgtcgtcttgtcccgagagccccgccggctcgactgctctgcggcccttcaaggcaccgtcaccccatccgcgcatactcaaaattagaggaacttttccacaacgaatctcctattcttagccccgtggcgaagaattccacggacgggagagtttggtgaactttgcgagctgcgggttgaagcgatggatggaatgattgttgattccttcacagtttccgcgataaaatcgagtccggctcgctcgttgaacatttcggaagagcccgaattgcctcgaggatcatgtacaatgtcttgaggggattgagaaaatctttcggcaccgcccagcggccccctgcttccgcgcggacagcgcgtggtcatcgcgcgagggcttcgtcaactgagcgtaggatagctcgattgatggccgattccagcggttccgagtggtccatgacggggtgcgagcggcgtttcgagacttggatgttgagcgtggtatcctccaggctcgatgaattacgccgagaaactatgacttatcggcgctcgatttgtgattcggacacaatggcctgggcagtatcatcgagcttgaacggggagccgggcatggcgcatcattcccggctggtgcatccaggacgatacgaacgaatcaatatgcatacgcgagttccggataagtgcctcgtatcatattgtcgagtacctgaccaaaccgggtcgtctaacgagggccgagatggcgatcgggggcgggcgagcagggcgaaaggggagagaccgaccgttattattataatggcgtcatgtgagaacccagacattgtgttacccgatatacaatattcgagcaagcgagccacgcagcggtgtttgctctgcgacgaccaaagcgacggcaggaggagcggcgccgtggacacgatagcatgtcagcatttgttcgtgcgagtgttccgtttcttttccccggcgtgaaacgagactcccgcgttggagcctgaatttctcccaccgcgttcccctccccctcgtaggtccactctgcccgaatacaaaaaccggttgcagtaacgcgcacacaggatttcacttgtcggactcgttttctgagccgtttgttcttggccaacccggacgttaatgccaacgccaccaccgactgtttggaaggaatcgctcgccaccccctgtcttgtcgtattgacagctgggatccctccggcggacaatctgaataccgtttgctcgtctggctgctcattaaactgggtgcgatgaaaagcgggtttgcagaacgctcgggaggctgctgaggatcgctcgggggagattccttggaaagatggagtgaaggctcgcgcatcgagccaaaaccccggccgatcgtgctgttgtgaggcactccgaagcatggcggagcatcgttgctcgcacgcgtccccagcgaacgacgggaaaactccgcgagaggagttccattccgcgttgagatcgatggaataactcgagaaaaggctgctgaggctacccgatcgaattccgacgggagaaccctcgtgttcagccggagtctacagctattacgcgggatgccgacaaaaattccgcagcaaatggataagggaaacacaaagtacgagcaaacaagttgcccacgtcggggtcgggcagagaagaaaaatggagcgaggaactcgaggcaagaaaaagcggtccgagcctctgggagattgctgatgctgctcctgcggaagcgttgatgatgacgacgacgacaatgatcatatgcaaaaagtatgcaaactccgacaggcagatagaaatatcgcggtcggattccctcaacggcggaaagccaaactcgagacactcgagcgcaaaacgctcagctgatgcgtcagccctttcaagtccattcaacgcggagcgcagtgtagcagcacggatgtcctgaattcgagtcgaatgactggtggtccctcatgatacgagtatcgacgtgagggctcgccacgctcgatatcggccgaattcggctgaggccgctgtccaatcgacgagagagaggctgagggcgagagtggggacagaatcgagatgaaaaggaaatcagaccgacgatgaagctgtggaggacgcttggaaggagttcacattcccttggactctcgcctctcatgatggaagcacgggacttcgtcggcgagagagagagagaggggggccgcggtccacgcacgagagttcgaagcggcgggaggacgaggtgcaaagagcgggctcgcagaggagggggcaatagaatagaattcattaagcgctagctccgagaacacagagccctgagacaaagagcggtttcacggacgaccaaagaatgacaaaaggccaaacaacttccctccgtttgcccggagcctcctttgaaccgtcggtcggtagatcggtcctcccggtaccaccgactgccgccggcccgcgcgtcgtgctggtaccccaaacaccagtcgtcccccgttcactcgcaaatctacctccgtcttcccaccagcgcccctactgcctcaggggttggggaaacgaggcatgcgctccgcagcgtctttgtcccagactctcaggcaccgcgcgtcctctggcttgccccgattgcccagcttccgtcgtgtcaattgacgggcgctcaactggagcgagtgtagtttaatgcgagctttgctcagccgccgcaactgtagatagtggtcctcgtcaccgtgccccgcagttcattatctcgatgaaattttacgtcgcaagtcgacagcggggtctccgaagatcgtgtttcgagcacgcagcagtcgagctgctattgctcacgatatccaggacagttgcaatgacgcggatatgtgtatcaagttacacagtgcggttgaataaaacaacagcgttccgagggaacgaacgtcatcacacagtcccgcgtatgccccgaagcaaaatggaagcagttcccttctcgcgcattcctcgcgctgggtttcaatcacactcctctcgctaagtgctcccaacggaaaccgagcgagtcttctacgtacaagtgccgcaaccctggacgagtttcgctccaagtcccccatacagccgcgnnnnnnnnnnnnnnnnnnnnnnnnnnnnnnnnnnnnnnnnnnnnnnnnnnnnnnnnnnnnnnnnnnnnnnnnnnnnnnnnnnnnnnnnnnnnnnnnnnnnnnnnnnnnnnnnnnncgtcggttccgctcaaagcggtcgcggcggcggttggaactctgccgcctaggactggtgctgataacgcgtcggcgtcatttactcgtcgttcagccgcgagctcgctcagcggcttttcgtgctgaaagggggaggggatgcctttctctttttagcttaatcatctgtgttcatggtatgcgctcttgaagcgaatccatgaactcgccctcccaggccccgtggacgagcgtgggcagagaacgtgtgcgtctcctataatatctcgttcctttctggaacagaacatccaacgcagggctcgcagaatggtatcggagttcatcacttcttctcactttgcgacagcgggaagagattccgacgaatgcgactcgtggcgtcgagcattgaccgagaacatcgggaggaagatatgtgagataccagacctgaaacgggtggcatgtctacatgtctcgtgcagtatgagctccattccgccgttgaggcatgaatgaggaaggaaaacgagttcgaggagaccatttccatgtcttaacggcgccgttctcgcgaaggctctccttcgtcacacaaggcctgtcggaaacacgccgctcgggctgatggcgacgagaaatagaggccgccaacagaagtaaggagtaaaacgcgcacgaaaaagtcgacgatgtagtccattaccatgaagtcccgcgcgatcccacttccctccctcaaactgatatcagctaccccgacggcggtcgaacccccgcggagattttcaatagcggtgggagcgctgctcgcgattagttgtcgttggagccacccgccgtcctttgaccgttccactctccctatctcccgcgatcgttcgctgaacagtcaatggctggaagaatacaaagctgcgatcctgatgaacttctgaagagtcgacaaggcgaatgatgctgcaacgactcgggcccctcaaccaatcgcgaggggtcgggacccttcttgaagccgttgacaaaacccgtcgtcgtcgttactcatgatgatcatcattgctcattctgctcgtcggcttttattccatccctcatgtcgtctggaccaatggctgtcagactcgcgcccttggaccgggagtggcaggtacacacgccaactcgctcacggacgcttctggcgatggagcgcttgataagtggcctcggctggttgcttgattaatcggtcgattcgttggtcgagattggaatcacttgaactcattagaatagaccgccgtgcggttcggagttcggctcgaggacctacacgttcaaacgcctctatcgtctctctctctctctccctctcgaggaagaggaacattatccaagaagtagtcggaaccggaataatttcgcacgttcggctgaactacaagccccttggagagcgatcgttctaattgctccgccattcatccagcatcactcgtgccccgcgtgttcgctgacattggtccgggtgctcccgagaaggcttcacgcgagaaggagccgtttccctaaacgacgacgggttcggctgtcaggtgtctccgtgacgttcgggatcgtcgcgagcctcgattcgccgctatggggaacgagagtcccctgacatagctccgaatcctctcggggatccagggatggatgtcaaggcactggcccataaggccgcgacgcgtcccggtccggcgagtcaagatttgagagcaaagtttcgcataggcaaaatgagagcttgagagatggacgtggatggcataggacgcggctccagcggagcaccgattgagagctgtgacgtattggagcaagagggctcgttgacaagctctaacgtcaaatttggtgtcaaaactcgctggaatggagattaacttctttgccacgcgctcacgacccacgccggtgcattgtccctgttcggctcgatttgacatcgggatgggaattcagcaacgtgaggctcaggaagcatgtctcttgttgattccgagtccagagagctggaagcccacggttctaccgtccacggaaccgaagctccgatggaaagatccctgtgctctcctcgacgctatgttctactgctcgaagaaattctcatcggggagcgtctccttcaagatgggaaccacctccgaaaggcaaagatatatcggaaaacatggtagaacacagggtcccaggacagtgttattccccgtgttggattccgtttcccctaatcccttccaccgcaaatctctggtccaggttggatggattgaacttgcgaccttgctccggaggccgtcagccggctgcaacatcgtgtttcgaaaccggacgcgactttcgtaacaggttgacgataaatgctgactagatggaaggcaaaagaacaatcggtctcaggtcgtctcgcttgttcggccgtctattctcttgaaatatcggtcgcggcatggaggaagatatgaaagtcctggaaaatatctcagcggacactgcaagaggtccatcaacgacccctcatgagacgttggaagctgcaacaacgacaattcactcgctgtgggcactggctttagcgggcggcagagcaactctgtctgtttgacaaatgctggcgtgcgtgcgagacacgttcattacgcctccgtccgaaaccaagccccatctgtacaccgagtgtatcaactctctgcggttgtttcttattcgggagctgcgcggttccgccgcctcacgttcggttcggcgacagtggcgccctctgtcttggagatcctcggggaggaatggccacgatgcagtacttgaaggaactggttggagcgagaaccgagaaatcgaatcctttgtccggatgaaaccctgcgccgttggttcttgagaccctcattggacgagtcgttcatcgagatgccaaccagtcacggaaccgattccaggctcagttttcagccctgtttcagacggctgagctctcgcatcaatgttccgcctttgcgcccgccgtcgggctcgagcgaaagttgcgcatgcgcgcattagctgccacaagtgtgtgtgcggcgacggaagcagcagacatacctaggtggcttgtgtgtagcatcgcttgttgtacttcttggtttcactgaatagttaccgacaacttcacgacgactacgacagcagttaggacaacgacaaccattaccacctctaacaccaccagcaccacaactactacttctagttcttcaacgaacacttgtttcgctctctgctctctgcgcagcagcggtagcaaggacggcagtagtagttactgctgcaggtggttccggacctgacagagttcattcgccttctgagcgactccattgacgagcggtttgcaacggaagcggcggcggcggcgacgacggaggaggctgtggtcggcgactacaggatctcgtgaggtcgttctctgcttgcttgttgttcagctgcgacgggcccgcgttgaagcttgctcgctcgcttgctcaatcaatcaatcactcaatcagtcagtcaatcaaccactcagtgaaccgatcccaacccaagccaaacccaaccaaccattttcttgactaaccaagcaagcaacccagcaagcaatgtccccacttctactggactgtcggtgggccagttgaagtgtccgctgaacagaacaatcgcatgattcttgctctcccgttacgatccggcatgtcttcgccgtcaagaatgtccgatcagctggtaagcccggaagccaaggacgatttaccagcgtttcgacattcatttttctcagagctcacgaaaaatttgcgctttcccattgcatcattccgtcccccgagcagcttgtcggtcgtttggatggccggtcggtcgttgttcctttcgataattcacttggtctcagtggcgttgatcggtcgagagtggttgctgcatccgcgaggtcacactggttcgacgctcacttggaacgatcgttttggatacgatcgttccgaggagttcacgccgatggccttccaatggcaggccagcgtccgagaccctcagtcatacttcaggccctggttcgagccccgcggtctcgttatggatcgcgacgcggtcgagcagcttgcggatcgatcttctcaatctgtcgcagttcccctctgatacaactctcgttgtctccttactaggaaggagaagaatccctcgctgttccccttcgacattcactcgaatcgtcattaggattggctgtcaaagagatgttggaggccatcagaggtgttggggccgtcagcgactgtcttagtcgattacgccgatcggctccgtgatgtataattcacgttcgtattctcgaagcgcggggagaggtatttagttggctctctcgagggagtccggaggaggcaaccaatgggttgacaggaaagggccaactgatcgaactggacgagcagcggttgtggaagatgttgcaacatctgcttcttgctgttgtgatcccactggactgctaagcaatcagcaaagcggtacccgatgaattaattatgcgaccgacgctccgacgaccgttcggccgagcgcggtgagattctgtttcgggcacgacatccgagccgtctcgattttgatcggcctcatcatacttctcgatctcagctccccgatcatcagcaaacgtcgccgctgagcattgggcgccgtgtcaatgcgtcgagcagcgttggttatggttttcgttgctcaactattcggctaattgattgctcgcgttggcgtccgccgtattcggcgcagtggtggtcggcgtgagactgttgctgatgatggagggaccgacgacgtcaaagatgacagctgcaacgaccagcatcaccgatgacaacacccataactttgtcaaacttgtgctgctactctaataagatggcaaagaaagacgcgtttctgcttcatattacccctgcgcccaaaacctacccacaaagaagcctctcagccacttaccttgattagcagcagcagcagcaaccctgccaccagcatcttccaataactcaatattcttctcatgtagaagcccctcgacctgcagacgaacactacggaccgaggagccccctcaatcaaatatctcagacttaaaagctcaactccgaacagggcgattttcccagaagatgctggttcctctcgttgatttagcgaactgctcgcctccaacgactccatgatcaaaggttataatgatttcaggccaaatcggaggggagggcgagacctcagccgaggacaaggaagctgaggcagaggccgaggccgaacgacttgaagccctccgcgaagccgaggatcgtcgcaaggagaagcaccgcaaaatggaggaggaacgcgaaagaatgcgtcagggcatccgggacaaggtaggcaatgattcgtccggatcgatgaccctcccgcgaagtgaacacattcagtgagttaggtaccctctacatcgtacaactggtctgtgggaaaaaccattcgggacagagtttccgagcagatgctcctgatcctcgaggcagctcctatcgtatagaacgttcaggtttttccggctccttccgattgctttggaagagttcggaggcgatcgtgcgggtgaaaaagtagttcgaaagccgtcgatttcgcgtctttatcacagattgttcgtgccgttctcttattccgtccgatgaagtttgtatgggacctgcctcgagacggaggctgcgtgtggagcgctcggattgttgttccgctcgctcgtgcttcgttcctcaaactcgatcggccccctgagtgatcagaaatccaagaaggacaagccgatgtttaccccgatcggatggaacgagggtgtcagcggacaggcgcaatcaattcccgatgtacgcattcatcaagaggtgtgccccactttattttccagtacggaattaagaagaaggaagaaatcaagcccgagcctgaagaagacatgggacccgctggattgaatcgacggaagaaaactccggaagaaatcgcagctgaaaacgaagctgcagaacaagacgagctgaccagtgagtattccttcaacgtcttggagcacgggtccccgttaacagtgggaattcagcagacgtacgtctccttaggcggtgcgcgataacggtgttgggaatttcccctttacagagctcaaaaacaccatcgaaacgcaagtgaacgaactcaaaacgcagatggaagggaaatgcagcttacagtagatgttggctcagcgagctcgcagatcgataccagcccgtgatgagatcttgcgtctcaactgaagggaatcgaaggaaattcacatgggagagcagcgcttgtggtccgacctggaggatcggaatgagagaaaccaaaacagaaccgaggaagccccacaggccctgaacaaggaaattcgccgaactgaatccggtccctcgaccggagcatgcatccgtcgtcgaaattatgcgaatggggaaaatcttgggaaaccgaagtcgaccctctcgtgatcatcgcgcctggtgctcgaatctgacgacgagctgatcgttttcacgaggtagtccgattctgaatttagaagcaaaatactgaagctggagcaagcagaaaactaccccaaaaaaaattgcaaaaaaaaactgagagtccaggtgaagacgattgattgagctggtagagcgctggactgttcttgctgtaaagaacaattcctacttcaccggcctaaccagtagtgctcacttcatagattattgagagcgcttccggcgccgtccttcgaccgtaactctattccgaaaactttgaaatcgagaacagcgttcttggagaccctcgccccatgacttcgatctccccctgcgccggtcaagactcatccccatctctgaatcctccccagcccaccagtgggcgtgctcccaccctttttccttccccccaccactactctaccgtcccggatgagaacttgaaccaactcggagtcacgggccgcgagaaacaagagtatatcccaaagttccgttgaacggcgcccgaattcgaacgattgctgtttctttctttggtgtgcgcccagtctctggcgcctccggaccaatctagagtctttcctgtccaagtctacggtcgggggacccgcaacgctgatgtaagtttccagtctgccgtactcaagtgtaagaatatgcctcacattcagacacacgacggaaatacatgaagacagtcttcttccaagcagaaacgcacacgagcgttcttccgaagctcgtggccgcattcacccatcaaaaactaacgttcgctttcgagacgaagacgacacaccattcacaacacagttgtcaaaaaaaactgctgccgcagatcaaaccgtggagaaaatgagaagaaatgatcctgaatttcggtctatgtatgagtgtgtccaacgagtcactcatggatttgactccccgtgaagaactggtggataatcacgagttttgatggaaaaccttcggtaccacccacttctcggaatatgtcggcgagcctcgtgcagggtcagtctttcggcagaatcgaggagcttgttggaacccaagatgaaattcctcagttctaggacgggcttcgctgtgaagcgtctaccaccacgcttcgcagcgaaccgcatcctgcgggaaactgtctcctcatacggctctggttcgtctcgttttttttccttccgagaaagaaggcctgtcctgaaaacaacgattgatttttttgagcttttacactctcttctcaggccgagcgttttcgattgctgagagcagcagcaacaacaacaacaactattatttttactatcattgataacggttgccaccattgccaccctattatccattgaagcatacacattactatgtactctttcgcaatactcctattactatgtgacttaacattcagccaatccggtcactaactcggacgagtcgtcaattcccatcacggagcgtgagactttgagcagccgaagcgaaaaaattgacattatctcagccgagagagaattgaactcgtctccgaagcctgacgggtcggcaacgattcattcagaatgccttcctgtcccgagttccgtggcgaagttcttttttgaagacttggatgacacccatagaatatcacgtatttaacaacacgttactctagtctcagatattatcgatattgcctatattgaagctgtcgctgagcaatggagacgatgataacgacgagaacagtagctacggacataccgagtctactgagggccttcccgagcgaatcgtctgaggttctgaattctttcgattttcctttggatgatgatactgctgatggatttaccaatgatgaggactggggagaaggccacaacgtactttcaaaatgagacgattcttctgagcatggagcagtagtttctcactgtcgaacagtcttctgaaagaaacgccgagaaaagctgagggcgaagaggaggggagaagctgatgacgagacaacgttgatcggaaaacgatcggcaggaaaaatagagacggaccgaattgaagagcttactgcgggattgattcgttgtcggaattcactctgtttgagaaaccgtacatgatggcgaagacacctcacttcccgactacaggatcgacgatgagatcaacatcgatctcaccaacaagctgacccacaacaacaagaacaatgtcgagcccaacatcaagtttagcgggaaagttagccgcgaggtcaacgttgagaacacggaattcggaaaacagttctgtcattcgaacaatgcgaacataaattgaaccagcaataaagataaagataatcgagaattcaacaggctaagcgaaccaaggcactgtctttctttggccactattctgagtttgcgactttccaagtgagaaccaacccatcgatcgctccccagattctagccagtcaaatatccacctatcgggttctttggatgtgatggacgaaactccatcacagtcatcctctcggaagtattaaggccgaaagggcttagcgatcgctcggttggtaaggcagcagttaccgagaaatgttcaccgtgcgaacacagatacacgcactcaaatcgataaacgaacggttgtccctcagaggtcgtcgtatttcgtgtgtcgttcgtttctttcttattgaggacgtgcgccaccgacaacacacctcggtagtgccaaccatctgcggaaacggaggagaagatgaacatgacacaagagaaagccacgccactcgtgccccgtctcttccggctatcggacgcctggatacgatgacgggagatgactgccgtggctactaccatcgattaccgtggaacaccaacaccttgcgtttcactccaaacaactacatgaaggagaacgcttccgagctcgatgatgactctcagaacaacaacaccagaagcaacaacctctcctacacaaggcatactgtctctcaactaagagttaccgactggaaagttacagcggtgtattgatagcaggccaacgaagaaaacgagattcaaggtatgatatcgaagcggatctgataaacgctgtgtggcagaaagagaagatgaggaatatactgaatttggggacaaaagttttcgatgactcgggagaaagagcgaaagcagtgggggaggcagagcctccacgattgaggtgatgataatgatgacttcgttgcgaccattgttgtactgagtttttgctgtacagtttttcaaacattctagatagcagccgatcggcgatcagcacatatatgttaatgttacaacaattcgaaccaacaaatatgtactcgaaagaaacttctgaacaagcttgccagctccacaacattgaacgtgcgtctcaatgacacaaaactgacacaagcgagtatgacgagaggagaaaagtaacaaatctttcctaacgcaacccaaatccataaatgacgtagggaatggtctaatgatcatgaagctagagaattacgcggccgaacttgttgtatgcaagtcatcacaagcattgcgttcctacatatgatacttgtggcttgtcgtgtttatatttgttaatgggttttttctagaccatgtcgccgaaagccttcaagttgtcgattcgtcgaactgtcacccgtggtcaactctaccctcagggagaggtggtaggctggctattttttggccggagaagtatgcccagcaacgaatgaacggagaatgagaaacaatgccgaataattatgatggttatgcagatgatgttgaggtgatacagtcgcttgacagcgtatataccgagaccagcaacaacaacaacaataagagtgaaaagaaccaacatcaacaagtgacagtaccagatggaacgatctgctggaaattggaactgacgaccaacgattggctatcgataagcgacaaaacacggcatagtaacgacaagggaacacggggtggtgttgaatgagaaaacagattggtgatggttcggagctcaatgcttcgcatcaactctaactcagtgagatccaactaagcaagcaagccagcgagcgagcagttgaagacaagaaatacccaacccattgtgatccatctactggttcaccagcatctgtgctgcttccccaaccatctacccctggactcgaattacgttcgacttagttcgatgccccaccctctggtcccctcttgtctcccatggatttgttgaagagccctcattaccctcgaaaccgaagagccaaaccttctacattcatccatcacccgcccgtcgaagcctctctccccgtctgagtttgaattgtccagctatcgcaatgatgattctacgtgaaccacatgcgtcagcaatgtattccctatctttgaacaaaataacacgggaaactgtcaagctcatcgacctgagtatacgacctcatcaaaatatccaactctctaaccgtcgagcgtccacccgccgtttattgtcagtgctcccactttgcacatttttagtcattggttgatttctcctcgatgcctgccacggtttcggtggaaaatttcctccactcgcactcacctcatcgtcttccaccggctcatgaatttgacatcgtccaggagccaccacccaacaattgaattatctattggaagataaattgtttttatcgttcaaactcttgtcctcctcagttgaatgtttggagctactcactgtgcagcgcagtggttcataatgtttcaggtctatacaacgatacacgactcaaatccttcgcatccgcacgacggcatcgttcgacacggagagcattgtgttcttcccagaaccgaactgttgaactgtttagaacctcaaaccgactagttagttcagctcccaagtcacttccactggtttccaagtcgttccttcctgtttcaacctgccttcctcccagtccctccaaatacccttcgagtcccccgcctttctaacagccagcagccaagaccctcagcagcccaccggccccgcctagaatcgagcgatcagtgctacgagttccctatgtacttcgcatgcaggcggccgatgttaaaacgattttccgcccatgccccacaaccaatagagttctgaccgagttactttgagcctgttgcctgcctgcatatacctacataacacttgttaccgtaatcggggactaaaaaactatcatggcaatcaataacaggaatgaggtcgtcttgccaaatcacacacggaagccaccagtctccattggagcccgaacagaaaccttagactcctcgatttctcaaatcagggtccatgaaaacatcacggaccatgagaacgaccaggtcgcggaagacccgatataccccctcggaatctccttcccgtgaaatttaccgcttactttgaagcacgcgagatcaaacgcgaacttggttgacagcagatcgcttcgaagaccctgtttcgaagcgtgaatctgatcattctaatcatactatccgatcggccgctccatcgccgcgcggatgtctgcctttcgaatcgagatctcggagccagtacaatatgatcccgaccggcgatgctccctgaacccttcaacgaattcgactcaactcccatgctaagaactgaaactgaaacnnnnnnnnnnnnnnnnnnnnnnnnnnnnnnnnnnnnnnnnnnnnnnnnnnnnnnnnnnnnnnnnnccgagttcagttgcacgttgagtgcagtctcctggttggaacaagaactcttatatgcaggcaaactcgacggcaaactcaccatattactcatgatagttgaacggaaaaaaaaacataaaaaaacaaaagaaaatactgtgcaacatactgattcgcaacttgaaaaggttttaggcgggagggccgctttgctccactgcatgacaccatccaatattccggaagtccatcaccacgattgccacgattacctcctactacaactacaaccatctgatccatcccagcctagcaccattccatccgtcgaacaccagccaatccgaacgccagttgtccccttaacgactaccagcacgacttccaccttcgaattcgaccaccattagtaccaatgagacgatttgagacactccgaacaatgcttccttcttccccgagtgagtgactgagtgagattctgttgtagaagttctcagtcgtcgttgtcgccgtcgccgccgtcgtctctcacaatgagtccgaccaccggcttcggatgcggtccgtttacgatatcgccagtggcgaacgacatgctccaatggaaccacggggtcttccctgcctgctatataaccaccctgagaatcggtgcagttgacttgaccgcaacgcgatccggtggaggcgtcgagagtgggccgcgtcagggcgtgatcattgttctgtcgaatcgctcgagtttggattgagcaaggagcgcacgttccgcagcagcccgctctcctccgagggccattgttgactctggatcacctccttgtcttgttctaatgtgtacacacagcagctcaacgttttgcgcaaactaagaatttattttgtagatcttctactgcaattcatcttgttgcggaggttcgaaatgctatcgttcaggacattgcctctggtatgcgaaccactattttcacttcctactgcaacaccttccacaaaccctgcctcagaagagaggtatggcaccgcgagctcttcgactgaacaggaaaccgctaacaaagctgggcttcccgatagctaccactctcgataggatcggaggaggcggagcacgagaggcagggtttcggccgaggcttgatgatcgttctatgcagattcaacccggcctgcgttagtcagtgcctaagcgtctctcgttccgcatggcgacgtatttcattgaattcaatgagttcgttgtttttctcagcatgtaagtagactcgtttaaattatccctgcttcaagcttcggtcgccatgcggtgagaacatgtacggatttccgataagagtcgataaggtcgataaaatcccgtgcaattcagtggcaggttcgcctgagaacatgtacggaacaacgtttagaccatgtactataaaaatgatttaagcagtacgaacagcagcaacagaagaacatcaacaagaaaaaacaacaacaacaataataataatgatataaatgataatgataacattgacctgtaataaacgattaagttgaaaaactgtctgttttcctttccggctccgctgcgatcggattgctaactagacaaaacgacctcatcttgattgtgggcgaaacccatggtgcaatatttgacgattttctccctgtttctattctttctgccgctatggctcctagggccgaccgagcagagggatgaaaaggcatctgcgtaagttacgtggaagtgttccgcatagttctcggcggaactatggcctgataaaaccactccaccggtcgcccgcaaagacggcgatcttcaccatcagagatggtggagtcccaggttattgtcttctctcgtagaggttccgggaccgtagctcctcgtttcgatggggagggatatttactcgtgtaagaccatccgatcaagtgcaacgggaaattttgggaactccgatgtaaggatgggtccactggggagagttggatactctcatccaaaattgaggactcgcttcaaaccacgtcaaaacacatatgtttggactcattcaccgcatccatccaggccatggaaaactagaattccgcaaaatcagatctcgaacaagcgagtcgattcgtcacaatgtaactcatacggcggagctctctctgtgtcctagttatatgtccttacaagcgtggttataaagcaagcaaccaatcagaatgtgaagttccgtgagccaactctgccaaagttgcagtgatctgccgaggaagtccgacaaattattggctcaaccgatctgaagattccaacagaaagtcctcgagctctttcattacccagcgagtggcagctcctccctcagaggcagaagatggcctaatttgcgcttggagtcgcaaagaaaactatttttgtggcacccggtttctgccggttatatcgctcatcacggacgagatgaagactggaattgacgagggtctctccggactgacgcggtaatactcgtgagacgatcagatcgtagatccgggaggttttggggacggttgccgcatcgaagcctctggttctcttgaaaaactggcaggaatctccctggaacgttgcatctatacctgatatcgatttcacgaccgccgatgctggaccagaatacccgatcttgcagtttgaatcgagagctacgagaatccagatgatgacgagcagggtgctattttcatttaccactcttgcggggtatcccggtggatccatgacctgagaattaccaagctgcccaatggggccggagagagcgactttcgcgccttcgagcagatgaaattcaccgtgctgaacgctctctagggctgaaactaagttggacgcctagcgaagggtttccgtgcgtggccccggccatcgctggccgcatggaatttcatctcgaggtgaagtctctaaatcgttggcccagttgccgactccgagtttatctgcgccagcagaggagctgtgaacaccgcactgaaactcagcgcctcgtttgaaggcccggttgatgtttccctctccttcttcaacgtcttgactggcaactccaacgttaacagcagcgccaagtgttgcgagcatcaagttccgtcaagcttcactcgccattagtcgttgggcaaagagattcccgagcaggtcagcatcagtcgtcggcatggtcggtaggccctcggaagaaataacaacagcccaactaggctgagtccccggtcatctagcggcagagataggagtgttttagagggatcacctcataacctgagtaaaggccttcacaggcagatctccggtatccgaagggatttcactccgactctatgaaagaagaaaaaaaaaaggtcggtaggccctctcgatggtggagttccatcggattttggtgtcgagcaaaatgtcgagaggttcaccgttgcctacgggcagcgccgtgagctctctcgaattcacccgtttcaggccgctcctttcgattgatccatgtcaacatcagctgagcacgatccacatcctcagctgactcaccatcgtgggaccttccggtattaagctcgccatcacaaacgttctcctgatactcgtcgccatctgagcttccgtcgatgcctgattccaagctgttggtgtaagcgctgggcgtcgctcgaccgataccatcatgaagaccgtgaatggtgctgagctgagagctgaaaccgagttgcgaaatcgtgctccccaaaacggccgaaccggtggtgttggtggagaggtaacactcgagctccacttcgaagtggttggggcgactccggatcgctccttggatgattatatccttggcgccctttccagtcacctcgagtctccggacccgactcagagtaatccttcagtactccctctccgcacccgatattttgttgaccatgtcgacatttcaccgcagcgacttctttttcttctatacggtgagagaggattcgaacttgactcttcgaatacttcgcagcgggagcttccatgatttttgaaatcacggaggcgacagaaacgaaagctcgggtgtattctttgttgtactttgcggctagggaaacggggcagcggaaccgagttctgaataaagtatcacacgctggtacgccacatttcgcccttggctcgccccaggattccggtggggaggaacctacatgcatgattcaatcagtcgatggaagtgatgttctcaagttgttccaatactcgtcaccgaccgtggttccatatatatccaaaggttcaattgatactcaaataacccggtttctgttaaggtcaaagaagctggataccaagctttccctcgagcatgagttgtgggaacagcagaacatcacgctgccccatagaacttcgaccgttcaaaagaggaacgggagcagtaagagtatacagcgcagctctaactggaattgaggacctcgatacgtaggttgaagcttcgattcaggagagcactacggagtcggacaggagtcacagaaagctttcgagcgaaaccacgccaggaaaaaacaattcttccgaaacatggcggcgacgacctcgcccggggccgtccgaagacacggtcagatcgtctcatacgtatcgtcgctccgctccggagagagctacatcttttcccgctggagccaggcaacggaatcggacacaccgcgaattccgtccagaagtctcaggagacggtcagatcgtgcgaggagtctgatcacaaccgttcagattgcgtcggctttccgcgccatactgcccaggactaaaactcattctggatgggattaaaatgtttgatgtcaatagaattgtgttctcatcgacaatcaacctctcgatcgttcgatccatcgcggaacgggcatacaatctgctcatataaacgcatctgtgtgaaccatatacttgcacagaccagcaaacattccaagggtgggcaagagattctactgacatattcgtgagtcaagagctttgctctcatatccgagaggctaggttgatcgtgacaaagtgacctccccagcgtattgaattcgattctcgaaaatgtttctcgcatcgtccagctttgagcggggcctctctggaaacccaatcgacgggaacattcggcatgaatggttcaaggcaccgtgggcgctccagctgccttctgaaatcgtttcccgacggaccttgatgcgatcgcagaaaaataacggaaaggtccccttccactctcaaaactccatttgccacagtttcgaaagctcgcagaagattcgcactcctcttcaagagcggtgcaaagttgtttcggcgttccatgaggggcttagttgccgtcatcgagggcaaattttgagatttgtgagcgctctatttgcgatcccgtcaaatctattctctgctgcctcaatgacattttcctcaaacgaaagctgcgcccgagcgacacgctttcgcgggttgatctccatgattttccagctagaaaacaagcttaacgtcgatgctcacgaagcgccaccgcggtgatcaccaggattaactaaccgtgccggcgcctgccgtggtgtttcgagaagcaatgccgttcctctcgcagctgcgttggtgtggcgagggaaagtcaaatatcttgcccgtgattgcactgtgtggctggaagcgttgtcgttctctgctgttcgcttagttcacaactccggctgaacgagtttagcgtcgaggaaaaacaaacagatcggtcccgacatggcaacgagtgaatcgaacaacgataaactgcaggaggtgaagcaacaggttgacgatgttgtggacataatgcacgacaacctcaaatcggtaaggttgagccaagtttctcatcctccgcaacggtgctccgccaagctcggagttctcgtcctgaacgtagagtggcgatcactcgattacagtcaaacagtgtcttttcgaactcatggcagccagaacatgctctggtcgacgattgggagacttcgcgagattcttcagcatgtgtcagcttgactgacgtttcctgcctcgcccaaacttccgaatccagcgtaaacgctcgctttcgggtgtgaataacctgctcggcgagcgtcactttcgcccgctcgccggattatgcattgcctttggagcatgtttgtcatgtggccaatgtcagccctcttttctctctagtgaattccgtgacggtagcaatgaaaggctggagagaactagaagcgaatcgtcaacattgcgctcctaccttcgacgaggtcgggagtcgtaagatgttgctgtgtttcattgaatattgattttcgaatttgatcggtccgcgggctttctgcgagagtcgtagtcaacgtagcgcgactgcggaagcgacgccggccgtctgactccggatcatcctcgatcaagattccccgacttgactgcggacgatagccggtcgcgcaacccgatttcatattaccttgtcttcctaaactctgacgaagtctgtagcgaccgcgcgcgtgcggtacgcactcttgacccgagcaacgtaccgtccgtgtttccagtttgattcactggccgtgtacgggacaggcgtctcgctaatcggagaagtacaacctgtcgttgacagcagtcgctccgggagccaactgtccgtatttcttgcctgccggtcccgttcggaaccagacagagaagcggtcacttcgacgagattgagcggaaaatttttgcagttcagctcctgatattcccactcggtgctcgcatctttcctcgagcattgctcgggtgcgagactctggaatttcgaatcgttattcatcgcgaacataatatattcatattgtagttcatccgacgtttgcagtgcttggtttcctccgagcacggcgagctctcattcagttgaatcactcgagacgcaactagcgcatgactgctcagaactctcggagtacatcccgactatacgtgttgctgactgaaattgtcgctcacagtatccgatccctattccgattcgtccccgtgtggctcggatcacagggattctcggatgagtcagctcatcaactctctggaatactagtgtctaccgcgacgaccttcatgcaccagtcccacatgcctttaaggtcactgcggatcgcgaacgacaattgtcgttcgatgcgtcggaattcagtcgagttcggggttctcttttcggttctccgtttctgttaaaattatcccgatgtcccatgcgcccttatcggatagcattcggatgacggtgccaactatcggacctgatcgaacatgatgtgggagttcggattctaacttgaaaccaaccgaactctcgttggatgtctctgcgtggccgggcggtgccatgtggctgtgtgccccagtttcactctcatttacaaaggagaatcaacgacgcatgacgacttctttgtgatcgcccagcagtttccagcgcgagacctgggagcgacccttgacaatgcgatttttcgccgagttcgaaacaagacgcggatgccgctaagatttcatgtcgagccgaactttcggcgacttacctcgcactggtcacggaagcgactaccgactaatctccgtgaatttcgagagggaaacggtaacaacggattattccgatataagtagttcgaatgcggaataacgcggtgaaagaaaggaaacagctcggcttagcttcgttgatcacggatgaagtaatcattggtaacggcttccgttcgactggcttagctcccgtctacacaggcgtgaatgcgccatccgagaggcattgtgactccttctcgttcctttcacaggttatccaacgtggggacaatctgaccgacttgtcatcccgggctgaccaactggaggagaatgcaaaagctttcgagaaacaggccgtgaccctgaaacgaaaacagtggtggcagaacatgaagatgaaaatcatcttaggaatcgtggccgccatcatatttgccatgataatttacctaagcataaaggagaactgacaggtcacgggttgacctgtcatttgtggaatcattcttaatctgaaatattcagggttgttgtcctgtaaagttgagcgagcttcgacgttgctgtacaaggagaggctggcagcgcagtagctacataagtgtaaatagtgttctcgaataaatcgtttgtggtaaaatcatcgttcccagtagacagagcaggctgccgacgttggagtagagacagtgaagaaatcgaatgactcccgcccacgtgggcacagcttaccttccatggggtgttgaatacattttttctctcggctctcaaaatcaacgctcgaaaggtcggcctcaggagatccaagctagaacgggcaactcggcaatcatagcaaatagcaaaacccgtcgagatatttagcgcagccgaaccgtgctcaacgctccgtttcatttctcaacgataccaccacaggctcgatgctcgggaccttcacttgattcacattcctttgcgattcgaatattctatgccgtttcagagccttccgccgccgagagctccagcgtctatgagattgagaaaggtctgatcggaactctgaggccaggcgtggagcggcgacgagcgatggcgccaactgagtacaatggtggtcgactgaattgtgtgaaaaccttcaaaactcatgaaacctctttttccgttttcatttccctcaaaaaactgtttcagaaatcaatcttgccagataacgtacttatccgacaacgattttgtcagagaccggactcggcagatagcgaactaatcagaaaatgacctcggcagataacgaactcaccagagagcaaacctggaatatgacagaagggtcggatcacgaactaatctggtggagaaccatagggattcgcgtcgagtggcaccggagtttgaaaagcaggtcaacatttcagaggaagtggagatagttcgacctaaacgagctcacagaagaatacggttctgtcttagagaggattttgcatcggttcagagatgcttctgggatgactctgccgagctcgttttctgacatatccagtatgcagaacgtcagttatctgatgggttgcctgtacctcacacgttcccctatcgcccacaacggacgaatcaacatagtctcctcagcatgaagtcccgacctatggtcggtttaatttcgatgctgctcagcagaagaacgtctagcccgccatctttacgcagtgccattgcacacttgatttggaaaggtcactagaagaagtgtggcgaggaaacgaatcccatttctcttccaattcaaccacttcttgggcgcgaaattggagcatgctatcgcggctcgaaccttttcgagctccatggcttgttagatgacggaagaccctgagggaaaccacagagaggacttcatcgtggagggagcagggaccaatgtcgacgagggaacgactccgatcagtttcttaaaaactttattaccttatatacttctcactcaacaagtttcagttcatctatacgagcacttgggcttctttaccacctgaagaatctctctttaacagcgttctcgtgttctgcagccaaggagtctatctggcggacaggttgagcctggtagcgctcacacaattctggaaagcaaccacttccctggaacactgtagaggcttcttttgattcttcctatagcactccatgacggcactttgtgtgttctgacacactgcctgctgggagtcgccgacatacttttgatggacttcggcaacgctccctgaaatcgatacgcccacgttttagcggaatcataagcccagaatcgcatctccaatcggatgattaacgaaacttcaaggatcacccacggctccgacgaaagactttaatctcgatggtacgcttaatccatcacattcctgcgcacgagtcgaaagatgaagaaagttccctgggatgggatctaccttccacaaacactcacctgtgaacttgtcagtggccagtttataaagctctttgttctgattggccagatcttcgagtctggtcctccattcctgatccagcttttccatatcctgatgatgggacctgccgctcatttcgctgtacgatggataaccagccgctgcaggggccggagaagctggtgtcgctggctagaggatagaataacgtctcccataattttcataaccttctcccgaggatatcatcgtccctaatgatcagaggcaacgaacgactgccagggattcgtgatcgtggatcgtgagctaagtgagtttcataccgttggctgaggtgagttctggcttctgagtcgttggacaacatcatcggagacggtgataaaatctggattggtatcgttgacgatcgtcactctacgggtagattgagatcctcccatctgcaacccatggagaaaggaaatctgattctatccgttctcaacactaaacgagtttggacaactagcgcggatccggaccaatctcatgatagagtcatgaagatgacagtcggttctatcaaagactcgagccttgaaacgtcaatcagggcgcagcgttactcggagagaacagcaatgtctcaagcgaattcggactccacgctagacccgagaacagtggcagagtccagaactagctttcctccgtcgacaatcacggatccaccatcgagcattctccacgtgaagtcatgcaccggcgaaagcagcaagacacacagccaagctgactctatcgtggaaacgaaggtagcgcggggaggtccaccagccggagaaaatgttctgacattctccggtgacgagcttatcttatcaaacagtgcggaaccttggatcgctccggcgcagcgagtgtcagctcaaaactacctcagattttctccagcctcagaacagtcaagattccaataatctcccgaacacaagtcaccccgaagcgaaaccactcgatgttgtcgagaccatcaacggtgttgggcccttccctcaaggaaaggcgggacacagacgacagcgatacgggcctgtctgggaggagctcgcggactgaatttcttcggccagggagagaggaaaccaaaatactcagacacggatttgtgctggactatcagttactgtgaggtggcaactccttagaatattcgaaatgcgagccgatgatacagttgaagcgtgctctttgacgcttcgtctttcgtgatgtccgaaaggtcaggatcttatctagaagttgacacctgtcatcagaggtgccagataattttttttctccggggaagatggtcaatgttcgggaggaaaaataattgtcttgtaagacgcgggttcgttgagttatttttccagtagtacaacccttaagtgcccgcccccgccgcaaagcggagatctgggagcgtctgttgcgacgaaacggaaattctctctccattcgaacgtttcggtgctagtttggtggaaaatttcattgaagctaacagcgtccgatcgggactcaagcgcgtttcctccaaattttgatccaacatacattagaatggaggttccatgaggagaatgaccgacgttctcggcctgtcggggtcgcactaagatcggttcactctttggtccaggaattgcaagtcctgacgatggagcttggaaggagactcaaagaggctgtcaaacccctccagaaatccgctttcgtgcaggagcttcaagaaaaggttcgggttcccgattcatactgcgccgacacgacggatccaatgcgtaactccagcatgcgactaatcgtgatcactcggtgatacttcaggtgcaacagctcagaagtccaacttctgaagagagagctgagcgaatcgacacaaactaccttcaggacacaatcgtgccccagagggtggcgttaaaatatgcgctcaaagacccagcagtagaagaggctcttcttgattccatagacccctcttactacaatgaagacttcgatggttcgctgtttgaactacgtcgtctccccgagaattcgcagccggagctcgtcaacataaatcgtcaggttctcgagaagcagcttgcagtcgtcaccaagaaagtctacgatctgatcctggggaaacagtctgagtactctgctgagatcgtccacgttgtggagcttcaggaaaagctaaccgcatgtctcggacaatgtgaggacgcgcgcagggcactcggatttacccaaggtgacttcacgcttcagaacatgaggttcgtgacttatggatgccgtggcggagtcattgatgattttctccctccggagcagatattcaccagccgtcactgttttcagagtgttgcgctgcacgcggcggcgtaatctcctgatggacacgctttctaaactatcggtcatcaagaccttacagcaaaccgatatcaggctgtacgagctgctcgagatgagcgaatatcctgccgcgatccagctcctgttggagtgtcgcaaagctcttcaggtgggtctcgtcagcagacagcttgcgccgaaacgctcagccggtcggggatgagcgcggccttttccatgaatctttccgcttccacaggactaccagcagttcgactgtatgaagcaattatccctgaagtttgagcgcacgttggagaagacggagcaccagctggacttagctctctcgaaaatttgtctggagtacaacgaagaggtttacgtgaagctgtcgtcggccttcacgctcatggggaaaggaccgaacattttgaatcagctactcatgcattacacaaccacaatccacaatctctcgcttgttcttgtcgctaagtacggcaacggcgaacccggcaaaaagcagtaccaggacctttgtggcatggtcagcgaggacaggtaaacctttaccgatagcggtcgtcatcatccattcctcgggaaacgccgacggctttccgcgatacgccaaggccgtcacctatgctcgtttccagatattcggaatgtctgcgagagctcgcgcgtgcatttttcaaactcatggtcagctacagacaagttctggaattccacgagaggacagcgaaagacgaagacaacgaaaacttcagtgacgacgaatggtgcgtactcttcttgacaaaaaatcgtcggtcgaaccgcgcacagtcgacttccggtgattcgatatgaccgaagcttcccttgatcattgttaactctgacttcgatatcttccatagtgacgcgaccaacggggatgcactctcatataaagacctgacgataagtccagctccagtcactgttaagcaccctctggctgattcggacgacgaccagagcaggtccggatcctcgtctgtcaacagcactcctgtcaaagtacggatctatatcatggcgcgcccttgattgacatgaagcctagtcatgggctagcacattatcgcgacagctcgccgcataattttcccgcgcggaaattcgcgaattccgtgcggcaaacctccagaagtacctcaacatgtatggaaaaacggctgctgctccgagataaaatctcgacttcatgtaacttttttcgctccgtacgcaggaacgcatcggtgaaaaaagtctcgcccgacagaagctcaggaacggattgcgccgtctctggttggatatgcaacaaaagttcaaggtgggcttcaagatgccctgttcctgagcttttcctcgcgggctgcatggcaagccttcgagtgatttaagatttcggaggctatgacccgggggtgtttaatcatgctgtcgccgatccacaggtgctcctgagctccttctgttggcagacgatcacggagttcgacaaattcatcgccgtactcaatataacgaaggtatggaacttcccctcccgatgcctttaactttcgagcgctactgacatggctggcagttaacgtgaaacgtgaattggaatgctttcgttctactcggcgtacctttccggtgtggagtcactcctggtgagcttttggaagtgatcgaaaagctgagatcgtaactccgcaggtcatgattcaagtgggcgaagtgttctgcgaagagtcgggatgcagtgccgacctcgagatcagcgcggaggatcaatgccttcggtatttctactcctatcacagccaaagtctcgccactctgaaaacttatctcgagcacgagtcttgggaactgatgcctgtgagggacagcttctccttggatcatttgcacgagttctgcttcctacaaggtaccaaagaaccttcggcgacgctcaagtcacttccggatcgtgaaatagttttcagtccggacgccgtcgatcccttcgagagcgacgtgcccccggtttcaaggtgagtacattcgttctcactttatgatttgacaggagaatagtgatcatgatcggaattcatgatcgaagcttattcccggtctccgattgcagcgatctagataactcgattttcgaagatgagggcgaagacgacgaagaagacgagagaaaaacgcatcatcggttccctagacacgctatgaccaatacttcactcaccatatttcgactcctcggaagatatctgaatatgatcgcggctctcggcggaggccaggttgtgactacgcaaggcataacctctgtgataaacctcttcgaattctatttgcacacgattttcgtccatttcgcgtccgagaacactgagaactttccgtggtgtctcagcccatcgagtcggagaattctcctcaggatcagagattctctagtggatagcatcgacgccaagacgcccctgcccgacctgacgcctctgcaggacggcggcttcaacatgttcaacatgcgcaagcgcgtggctgcctgcgaaagtctcacttttttgtcggcacagctccagctcctcctcccgcaggtggactcgcagatggccgacaagctcgaccagttcacagcagatatcgaatgcgctcaagagctgtatcactccgtatacctcgcagtgccttccagatttctcaatctgccccagctcctcgacggcatgtcgagcgtcaattgggatctaagagatattcagacgcagcacagtccgtacgtggactcgttactcacccagcttgtcaatctcgaagagaccctgtgggaaagtgccttcccagagggagtgattaagaattattggatagtcacgctgcgtctatgttcccaggtgaatttacaagctcctcaagactcccggtcgtaaccttcatttccaccgcgttgattagtttgctaacctcgttacattcagggttcacgagatcacaagaacaaggatatgatccctttcaggctttcattgagggtttctcgagcgccaaaaagtgctccaacgccggtcgagctctcatgcagttggacctgcaacaatttctgtccaaggtaatgtccgtacaagctgtcaagctgttcacgctcgaaaccccgtcagaaagtgcggtgaatattcacggaagagatcatttctgttatcctggctcgggtcgataactccgacggtggctgcatcagggaggaacgaagagttcagagattatttgctctcacgcaggtggagcggatgcgggtgaaaatgaagccaataccggaccagacactcgtggagtcactcgtcagggcctactatctcattgataaacctctggaggactggctgtctcaaaacatgcagtattactccaagagacaactggtcggtttgttgaactcaatgagtcacgttaatcggaaatctcgtcaaaatttgatccagatgattgaagaacggtagctgtcattggaaacggacggaagggagcgatcgcagatggtcctccgcagaggtccctcatcgagccgtaatgagacttcggacttcgaattcaggaacctcaatccaaaagaatggaatgacaagtttacggattttcgcgagggttcggaatcatatttgcactgctcatgcaaatacacgaattctagtgaaactggaagcgaggtcgtctccctagtagaatatcggcggactcgttctacattcgtagtacgcttccgactcgtaatgcggaaactatatttattttgatttcgaaatcgctgggatgagttgctcttgtgctttcaaaagcctccgtattccgtcggatccaactccaatggaaaatggagctgttttttagtctagtgaagattttgaattggacgtacgtcaagtttcgggtgacaactgttgagcagagcgtattggactttctttgatgagatggattgtttccattgtaagaaagagactaaaactgtttcggagtgttcgcagttttttagttgcaaggctcaatgaaacgcgcttcttcgcgagaattatgtctatcttattctcataaccgaagattgggccatcaaaggtgtgatcgtggaatcgctcatcagattcgaatatcagtttgtataaattgctatcatctgccgttctgtcatctcaatgaagtatcccgccaggagtggaattccatacgtgaagtttcatggttgccgcaccgtcatcgtcatgaaacgcgctgctaagatggcttgcgagattgattcgtcaatcaactacctttgtcatgatggcgttgtgtaatgaggaactgaactgctcgacgatgtggtatgacctctcggggattatagtatgagtcatacaaccagatgtgctgacttcgaagctcgattgcaataaaacattcggagacattgtgtattctcctcatgggatggacgacaacatgcatattttttctccagccaatctaatcacattccgcataatttatatcaattcaagaggcttaagtatacaggaatcatgaaatcctcgagcagtttatttctcacgactcattcgtagttcatgagcaggattgtgacgcgttgcagctcttggaggccgcgatgaatatctcaaacctgccgcacccccttcttcaaacagttttacagacttcagttcactcgaggactcgactagcatgtttaagtggaatggcgcttgcaagtttgtgaagagaatatcctgaacaatactgcatgttgtgatccatgtaatggctcctcttaagatccggcacccttcagagtctttgaagtaaccctcagcagaagaggatcacaaattcatgcatcagacacacgttctagatcatgagcattcagggaacagtctcaagatcaacactctcgaagccgaggaacgctcacaaagatcacaaatgcacaacatcaatgcatgagatcttgcacacacagtgtacaggttaagaaacgaaaattggaaaagaaaaaggacgaaggtagaatcgacaatctccagatagagattttatgtttgctccgaaaaaagcctttctctgcaaagtgattcggagctgtccaaatgggaaaaaagaactcctcctaacatggtcatgcatcccagtcgcatgatcccagggatttaggctctttgggagggctttttgagacagagcaatcccacgagggacaggattggtcgctcctgggtaattcggatcacacggctccaaggtccgaatttgaacaatactcctcagggctattcacctcggattatccgctcaccttccctcgaaagagctcccgaaaaaaatacgactcaaagatgccgagttccaagccattgtgcacgtaataagccagctcattatcacagagatgacgagcgaaacggctttgttataatgttggccaagtaccggggaagcccacacgacagaaagcgtcagacacccgaagacgtcgagagcgttaatccagaactgggggaattcgctccagtaacacaatatcggtatggatgtcaagatcacactccctttgaaactagatgcaaccctacgaatgatactggcatggatattgtaacttgagtttatcctcctgcacaaccagacaaggctcatatggaacctgagcaaacacacaaacatacaaaaccaccacggagtgaatacaaacagcattatcgacgatgcgacgcgactgagctcgtagaagaggaaaaaaatgaaatcaggaatcggaacgaatcgaatcgaattcgaaaattcgaacgaaaaacgcctagaacatgcatagcacagatcaagtaagctcgtgacccaagagaaaatcagctgggcccaccgcacgtgcgcgttcgtagggtggaataaaatgccgaggaggacgcagccctgcagaatcagctgcgggaacgctccgagtagaacttgtgaggagtggatgaataccaggtcttcctgagttgagtgataatggatcatctcttcgaactgaatgtcatccggcttcctcttgaatttgaagctcgtgtgaagttgtcgcgtcatgacttggagtggcaggataggaaggagagtgtacagggggatgagtagcttgctgctgacgtacgtacaggccgtccgaaaagcggcgaagtgaatgaatacaacagtcagtacgctagtgactagagagctccatgagtctccgcggggcgcatcgaaatggaacaccaccgcgacccagtcggacaaaatatcggacacaaataaaataatggcggcgacttgttcgagtatatctcgccaacagtggtgccttgaaaagtgtgcggtgagtattcgtttgacgtcccggacgacgtccgcagttaccgtcaactgctcagagatgagctctggactgtccgagaacatcctcgaagacggcggcaatttccttagcatgaatttgaaatcatttttgaaagtcttcagctcatcctcgaaatcttttcgactcacgagctcctgaccgctgtacccggttctcaaaacttgagctagtttgttgagttctttgtacaggtcgagaagtttctgtctctcactgtttttgaaatcccctatgtccacactgcatgccgccttcatgaagtatccttcgagcatctccaactcaattgttatgcctcggagctctttcctaatgccttcccattgatagttcgacggaatggcgtctgaggcggatgatatcgttttcgagttgatgggctcttccaggctcgtcctgaaatcgaatttctcatttcagagaagactccaccacattctcaattttgaacgggaattgaatcaaaattcttgattcggacgatgggtcttagtcagaactgttttggcatggagagtgaatgaacaatcgcatcctgccagattttatccaaacgaatacgcgaatcatcaattcatcggtatcaatgcatgtcttggcaatattgctcgctcttggctaccgaacttcttggagatgaactgaaactaggaaggggctaaaatgtgccgttacttggagagacttcgtattttcggaacctttatcgtcgacagatttggtttctcagctaagagaacaaagggcaatggagggtgctttcttcggagccgtaggggagagcacggtggcgggatcaaatgccacttacaaacttatgttcccaagtcacatggtcggcgcgtttggaatcgatggtagaacactcacctctcctcctcatcgcgaaccacgcttgtttcctccagagtttcaaacatcaatattcgacagccacgatgatcatcaccattgagttctctctcgactccggaaccgtggaccggcaggaatgttctgcccgaaacacaacaaaacagccgcgcgcaccctctcccttgttcagcgtccgtacggagcgcttttatgagggtagcaccgcgtcacgaaccggacggagcgtctctgtcggctttcttcgtcgctgaaagtttcgaaaccatgggagcgagtcccagtctacgatcgccttatgtgagctgatctacgtgttctttggcatatcgctcagggtcacgagagaagaactatttctcgctgagtcttgagaaaatcggattgcgaactcgagcgtcggccccgaaagcctccgatcgcactatcggtggcagttgattcgaaaatgtccataatgggcttctacattttctttcggtattttatagagtcggtgtgaaaatccctccggataccagagatcgcgctgtggggctcactctggttatgaggtgtttcctctgaaaacacacctatctccgccttgtgggagccggggactcgacccgcgaggagccgtgcggcattgctccattgttgcggctcctacttgcagcgtttccagaacgaatgcatttgatgaatgaggagcgacagagcgaccttgcacatttgatctcagaatattggaatctctctgttatcagcttcccgatgaacaagagagctcccgcgaggaatcccagtcgccaattgactgctcacacgctcgtccagcgatatgacctgcgattggatcggcgtatccatttgcttggcatttacttttcatcagggagagctctcgggtccttggccatggcctcccttacccatgacccgcccttgcccagcaatcggaggcaaggtttggaaggaaatcttctccggatacctccatggccttccctcatggtggtgatccttatctcactttctgtttttctattcggtactccacggaattcctctgtgatgactggctcacgataaaataattcgagtcttccgtcgacagttgtcaaatgtatgaggaaactgataacttcattagcccgaaaactccagaaagtaacacagccttatgattgttgagcacagctgttgagagggcggggacaacactagggaagtctccgcacggtcgccagggacgctacttcaggcgtgacttggatgtctcgcgttctgcgcgacagagttgttctcgtgacgtgagcctccggagtagacatcatttcgcggagttcgaaatccgccgcagaccagctagtcctacgaatcattttccgtggtccaatggtccggaaagtgatctcccatcaggagagatcctgctgaaggatttaacaccgattcagctctgattctgctgatccggacatccttcactgaaacatttggcatcgcattgccgatcgtttcgggtgggcctgccaagtccggaaactcatccgccccgtccgataaattgtttgccccggtccgatggtccggaaatagattttcttaaaggaaagatcctgctgagggatttctaaccgatgtagccccgattccgtcggactagccagtccgataaatcatagcgctggggcggatgattttccggcttgggcagtccgaccggatccgatcggcagtgcggtgctaaatgttccagtggaggatgtcctgatcagcagaatcagggctgaatcggtgtaaaatccctcagcagggtctcttctgacggaattttttttccggaccttcagaccagggaaaatgatttatcggactggtcagtccgaaaatacgaatgccggactggtcagtccgcggcggatcccgaactccggaaaattgtgtctgctccggagttacgtcctcgtcctgatattgttcgctccacttcctgtcgcggtgagagatcgggagtttgcggaacatacgaattttccaagtcgaaggagcatcctaaaacatgctcaatgtaggaaccaacatccgcacaccatccctcgctcatttcgtgaaattgagttcgatacggattgaggcaggggtttccaagggtaatttattctttgcgcgctattttccgcccgagatgaaatggatcggataacacgactcccggcaggcaagttgagtaagcccggctacttctcgcaaacgttctcgttgactcctcgtattcgagcaatccggtgagttgccgagagaatgagatctagaaaattttctccgcggaaaaactgacccccttctgaaacatccaggaataactctgaataaagcgaaacctcaggtagagctcatcgatcggttttcatattaagattacctcctctgggagctgctcttcttctactgttcatgagccgaagagtagaattgcttcgcttccggtcggtcgttccctgatttcggcattgacagcgcacccctccctcccacgtttctgatcgaattagctggaggaggaggagggtctgtgggtcgggtggttcattccgagaacggcgcagggagctcggaagctctcgaaccggttcgagtcatgaaagaaggctcaataacgattgctcacctgaataagatatccacggtgaaacttggacgggcttgatcctcgcctcagctgccttattcggtgctggaggaactttgttcccggttgtgatcaggcgagacgaaacaggtgttgggcatgtcaccaaaacgttcttgtgcccgcaagcggtacagacgactatcgtcgagcttccgttccctatgggatccgacaatcccttgaggtggccagtttcttcagccccacagtccggacctaaatgagccttttgggagagaacccataactgtgtgagagatcaaacccagtctggagaaacagaaaccgctcaagtactcatgggcaccctgggaatatgcccaatcgcgacctttttcccgattacgaatcgttccagattcatggtcgtgcatgcaaacctttctccattccatatcacgctccctctgttctcttagctctttttctatgagtttctcttgcaggttatccactgcaaaaagcacgatgagtttttgattttctcttgattggactcagtgcgttcggcatcaattgcctcacggtttcattcttccctcccattggaatagcgatgttcccagcccaacgtgtcgacatattggagaaaatatttctgaactcactctcagtgtctttgatcgatgatctccaaggtctgaggagtttaagcaatcaaccggatgtcagaacgcttcgtatgattatgacacgacgaatccaaatcaaaatacactctgagaaagagagagagagaacaactgcccgaggttcacgatgtcggcaaaactggcatcctcgtaaggttgcagctgacatggaatctccataacaagattcgaatggcagagctatcgccggacgcagcaatcctcaacgaagttcgtgtatcgtgtgagttccacaatcgttttcgctggaatcattgggattttctctgcgcggagaaaggagccgtatctccctgtgcttagttatggttctttcctggagacaaaaataagggcgatggattcattcgaaaagattagcgctcgtgtcgttatagtcattcgctctagtagcgctttcggtgttcctctttgaacgagttcccagtcaccaaagatttccgatgcgatccccaccgactccatgaagttcaatcacgctcccaactcggcatcggagctatgagggctacaattccgctcttcaatttctggtttcccatcaaacctgtccttgaccgcccgcagaaactcttgcgtgagccttgctgttgaaacgatcgagctggaacctcgtattcatcttagcacgagtctcccgacggcaagaaccttcaactatgtaggatcgaaatcaattttgggagacaagagccccgcaggagtctacaattttcaattcaaggagttcaatagtgctgtagactactcgcacggatacatttcgaatacagtcgcttccgcggatgtgcttcacgggacttcagagcaatttcggcagctcgcccgagaatcgttcccgcaatcgattgtgagatgactcacgtggttcgaatgctgagacaagggaacgtgtcatttctttcccgccccgacgaagcgctgctgatcggaacgtggaggtctatttccgcgactcctggtgccttgggaggcagctaaaattgagtgtcaaccgcgctaggagactcgagtcgcttacctccataagaggagccgaaattcgcttagggaggaacacatcttctaattcgtcctcgacaaaaatgttcgacagtcgtctagtgcgaaattttcagcatttatacacatgatgagttttcagacatcagcagagagttccagatgtgctctgattcatatgcgaaaaatccaggtcggatcggcccggaaactccattatcggatgactgaatccgggaagagcagtgtttgcgatcatcccattccctcaaagttccgagctatggctcaaaaatattccacgatctccaaagtcggccgcccaagtctcggttcaaaactaccgtcgttgaaactcatggatttgggttatcgaatcgggtccttcagcgccttccgccccttatcggctgcggagtgtttcggatcgtgactggcaagaatcatgagtcaacgagactcaaccgcaaacagagttatttcatcttatttcctctgaattgcagataattccttccatcgagatcatgcgacggatgaggaagttgaatgaagaactccgagaacggaggaaacgggagacacttcatcagccagccgagtccgaatctctagctgatctgtctcgtcgaaagactgctcaaactgtgggtagagtgaaggtcggtggtagaggtcctgagctaggttctcagggataatcgaaaagtggctgagcacatgctttccgcaaacaggcttttgaaggagaggctccaacggagaaccgcgaggaaaggcacgcgcgtctgaagtttgagtatgatctcactcaactgaagccgaatctcctcacacgttctccgggaagaaaggttcgaagcattatcgacttcttcaacggtcgggtgagttctgggcgcctccagagctagtgtgctctcccaagaaatcccctcaaaaataagacctacccccaaaaataagacggtcaaagtttggttcaagtcggtctcttacgttcccagaaagacactcccgcgaacaaggatggcaagcgctccactttgaaagtatgtgttgaatgatctggctcaatcgcgttcataagcttggggaggtcgctggagttgatatttttgcgtttcagcgaagtctttcgaatgtagcaatcgccttcccccgtctgatatcgccacccaaggcgaatgtgggaacccccgctaacaggtgaccaagtcgcaaggaatgaatactcactagctggttcccttcctccgacgaagtcctattcggaatctagattcagagaggcgaaaggtcctcaatgttccccccacagtcgttctgcaggcgaggactctcaacgagtggaattcttttcttcgtcagctcaaaccgtctcaggagagtttggttcagtgtcgcagacctttctcgcgagggaaatcacaccccactgagttcaaatgaaagccaagacttcagttccgattacgaatatgtaacggaagatgaagattcagctcgggcggacgtcggctgtcgaagaaaacatggaattcccgatgtcaagggcctgatcgacaagttttcagaggtgagctcatttcaaatcttggagcaagttttcgattatcgattcaccatatttcccggcgcaagacccgtgtgtccctccggaaatctcgcctcggaatacaatctgatgagccacttcgagcgaatccaaagtccgcaccgccgcgtgctccaagcatatcgccaactgattcccacggcaagcaagcatctgctttccccatgcgaaacgttcatcaatgatttgctctgggaagtcgcatcggagcctgcgtagataagctgattgcggaggctcactgttggaaagtgcttcggtatttctcgtttaggctcccactacgactaagtctccgaaatggaatactcctgacattcgatatcctttcgaatctaactgatgggctctactgaaaaagtgattcatcgagtagacttgctccttatagagagttgaggttttgttcaaatcgaagatcgccaggagcgtgctcaatcaatagagcctgcttattccttcttcaaactcccatttgggcccgctcgaagggcggcggccggtcgatgcagcatgcgctctcattagaacagatacgttggttttgctcagggcttcgtttattgggtgaactgacaaacggattgtatttgctatcacggctcgcagtacgtaaacgcacccagacctgatcttatcctttgacatgaaccggtgcagcagtcctgatcataattgcacgggctgtatctcttttcaaagcagcaggttttagtcgcttcaaagcatttgaccgaatttccacggaagtcacagcaggtttggccttggctgcaatcacctcggatttctacacatgcctcggccgctcgaatcgctctggacccgttgacgtgctgttcgggactcgttacctcaatcgggtcacccacgacctcgtgcagcgctgcgatggatgagagtttgtgagttcagcgtgaagatgaaggtcatgagcgctcgcaatgtgttgtacttacagagaatcgcgatagccagaatgaaggtatgcatgtttagcgaacctcggctgatcccgttatggtgagctttctattccgagtgagttcctatatagtatctgacgggccgaacgaatcagcctgacaatccagaaggataaactctcaagtatactgtcatgccgagaagatacatagctcaacattctgtcaggcgaagtgactttcgacgtcggggtcggctgagtcaggctcgcgttgccaagaattcttgattccgcaaattgttcaaagaggatttagtgagactcttgtgacttcgcgttgagtcgaaagaatgatcgcgtccggtgctcagcatctgacccagcttcgagcgttaacttcagcgcgatcgcgagattccgctgttcatggtgcgacgcgaaattcaatggcttgctccgacagtagctccagccccattcccggctttttgagaagagctcggctgctccattgccgaggaactcaagtgccgcatctagttacgttactcctgagcggcagtccagtcgaccgttgggaatcactggatgtctgtgtcgtgcatgcatactcctgattgggactcggttattccgggttccgagctcgagctctctgcggtatcgcagcagtgaccgcacggttccccgatagaacgtccacatcgtgctctcaaagcttcggttctgattgtggatgaagattcgggcagacgtagccgaccatacgtaccattcctaaccattgatggcaccagcagccgctgccggggtgcaccagcttgtgaagtacatctcgtgtacactgacgttttacaatgatctcattatttgttgtagctgccggggaagttagatccgtcgacagagtcacactggagtgtgagttcgatgtcaggacacgtacaggagacttgaaaaacttggtccgcggatccgcgactcggcagcgagtcagggaccacagaaaaactctgaggatttgacgaagtcctggattatatgagtccagcctcgtaactccctgctggcgaagcctccggtcgcacacgtagtgaactttctgaacgaaggagcgcccgaaattgtacatgcaaacgaaaaccaatcgcgaaagtagctaccgagatcgatgcggacgtcgaagaaaatacagttgatcgcttcacttttcccacgaacaatcgacgtttttattatgcgtcgaagaatgagtgtcggcattgttttacaagtatacattagagagggattcacttcatttgcgcctgcttgactttcgctccttcccccgcgatgtcggagctggccgcttctctcgcttggtctttcgccgctttttgtccgaagatgaatcggatgatgacgatgatgaagacgagccagtctctgagtcactgctgctactcgaagacgatgaagatgatgacgatgaagacgacgaggatgacgaggcagccgctggcggcgctgctggcttcttcggtacgctcttcaggtgtgttcgaaggtcgtctctgaaaagtataaggattcagttcatcgtgcatctgcccagttaaaattagacagatccatgggccaagcgagatcggtctaacgaatccggatatcttgttctcaattctgtagtaatcaagctcgtagaaacgatcggggaactcacgtgagaccgccgagccctatcgatgtgtagaagttaattgcgaatctagtgttttctggcgagtctcttggaaaaagcccatcgaacgcctcttgcagagtcgggtccttgatcctctcgttaagtttcatcagtcccatgaactcggccagctcttggaatagtatcttaatgaagatcctcgaggacgaattcgtggtctcttcgctcatcttgattgtcgacaacacctgccacgggatggcgtcgctataaagaaggctcgcgaaaaacttcgcgcagttccgcagcttgttcgtgtccagacgatgaacagtctcgtaggcgttgacgaatatctcacaaaacggttccaggtactctctccgaatcaggcaaagcctttgagctatcaatgcgaaaaatttttcatacgtcctctgctgcgagcagcagtccaagatcatgtggcaaagttcaggtatttgattcggctgtatctgcaacttcatcaatttgtggacgcattcttcgtaactcaacgagctctggatggtgaggaaaactgttctcctcaacgccacgaggtttgtttctgtgttgtccacgattgtgtccggtttggcctcggcatcttctccatcggaatcatccgaagatgaacccgaagaaccgtcttcgccttcggagctgctatctccgacgatggttttgtagattccttgatatttctcttcgttctcctcgtactgagggtcaaacttgaatgcattgagaccgtcctggccgtcgttgacctcttccaacgtgatcatgtgcgtgaattgatcttcctcctgaactaggtccaggtcgggaatcaccgacgggtgatctttgaagccatccttccgcacagccgccaagacttcgatcatatattggcaccgcttgttaactgagccctcatgcaggatgtttcgcaaacgttccatgatggcgagaacgccgcgcggtgtgacttcggtcagcttgcgaccaacctctttgaggaatgctatcgccacctcaactgagtcctccgtcggtttttcgagcagaagagtcaaaatctcgagagcgataatttcgtgagcgacctgctggttgaccaagtgcgcgaggaacttgacagccgcaacgcacattgtcttgtcgttccgccgaaaacctctcttgaattgtaggatggtcctcttcaggatcagctcacccgtctggggaaatttcgaattgataaccgcggccaaggctgcgtacacgtgggtgaacgtggttgagaatgcttgagcttgcataatggaccgggctaatataccccgaccgcggacgagattttcacgaaagagttcgaagacaatctctttcaagttggaaacgttgaccttgttcaccaaaccgttgatgctcttcttgagagcctcccacgcgatcctctgatactccagactccctttgtctgtgatttgcctctgcatttcacgaagtttcgccggcggaatgtaggcacccccagttctggtcagcatggggtccaacgctttctttttcggcggctcaggcgcctgcggggctttcggcgcaaccatgacgactcttgacttcatccttttgtctgagtcgctccgctcgtcgtcggttgggctttcagactctgagctacgtcgattgctttttgcggctttactctttttccgattccgaccctcttttccggaactcttgctgtcactatcactttctgccacgggctcagatctcgttgatctgcgacgcttcctcacagttttgggatgcggggcagcagccggctcctgggtcggcgctgtatcatctccgctttcactgcctgacgatgacgagtcggccacagttcctcgcactttcttcacagctaccgtttgctcgattggtggctgcggcgtttcatcgatttcaccgtcactctcagctgcttgcagttggaggacgtctggatgttccgaagcgctcctgggaggaactgacgtatcaggctgaggtaccttccctgaaaggtcagagaaactctcagtaagagatcggcgtgtaattcagttcgctggacaaatatcgtgtccgacacatgtagcacgctggacagcttggtctgaactcaccatctttgcttttcttcatctcgagggctgtttcgttgatagattccaacttggtcaatctcttcttgctctggtcttcgctgctctcgcgttcctgggatgtgcctcgtctgctcaccgaagtttctctcgaagatgctgctgattcggtcctcacacaaatgatttcttcgcacctgcctcggtccctgtcggcgttgcgttcttcggcgtagctgcaatagagcatacttgaattgggcattcccgtttttttttcgagttatttttcaatgagatcgagtcggagaatacgctcggaatatgcgaccccgcgagcacaacatcatctctccacgacctgatccctccgttgacgtcttgccgacgtccgtaactgtcacagaacctcgcccacatgtcgcacgacaaaaacgtcaaatattctccctcatcaatttcttctatcggagaatggtgtcacaaagagactcggtgaagccgtcatagctcgtatcagttcgtttctcctatcgattccatgcatgccataccgtctgtctctttcgcgagtgattgtgtctctggagtcgtctcttcgactcgagccgctatctacagtgccttcacgtgccgcgcgttcgggggtgggactcctggatgaatctgagcttgtcgccgtctttgatgtctttcgttctgcctccccatcagaggatgaagaggaatcgttacgcctacaaagaattgatcactcgtgattcctccaggcataaaggatgagatcaaggttcgacaaaatctcttcggaataacacgcactcaatccaccacgaagttttcggagatcacacgcgtatccctaccgtcacgattaatattgttccccctgacgagacatctcccaagaatcagagacccggtcggtgaacattcgagcttgaatgagataaatttctgaacgccgcgaacctagaaaacgttttacatgggacgtgtgttatggagctagcgtcaaaaatcgtcatgaaccacgtatgacggagcttacatcgcgtctcatcgctatcagaggttcggcagatcaagaccgcagtcctggaaattgattcctgccagactccgaatgtttccagtcatggcgtgaggccggcgccatgaaaccccggcatcgtgcaaatcgagaatatcggcgttggcgccatcggcgagaaccacgacactcacgcgtcagcttgcgattcgaacactcacctcttgggcatcactcaaactctggctgcgatattcgcccagtctattgttgacaattttctaacaccatcaactagattcacagagagccgcaacgatagaacaggagcgagtcgatgtcgctcagatgccctcgactgtttacgaatactccctgaccgccaaagcggcggaaatatcaaagcagtgtcggaaatgggtttttctcaaacagatcgaagttctcctgatgggatatagcgtcttcccccccttcccagcgttgagagagcgctctcgagatcctgggactcggagagaatcgtcgatccgaatgtctcagagcgcgacgcaatcgctagttggtgtccaaagcggcgcgctgcttttcgcgtcgaccgctgcatctagcccgaaagctccttgtttgcattccttttttttctccagctgaattgtgaatgagtcgaaacaacagtgatacagaaacttcactgacggcccccgtgttgtgttgtttttgcgcattttattgtaaatcgatttcagctgtattcagtcggatggttccggtgagtcgctttcctgcctggtcgggaccatttctcgctgagcacaaagtggaatgctgacgaacgggctgcttgacaagaaattctcatcgttccgactattccacgatagaaccactggaaacgcagaatgtgtggcgagctgctcgtggagctccaacgagtgcttgagagctccagaaaaaatgatgacggaataaactgtcttcatggccgcgtttttccgaggctatggaatcccaacgtcctttagagaacggggaaccatgtgaagtcgaacgtggccacgacgaagcgaatcccccatgaaaatatttcggtctcttcccgaagttttcggaatgcctgtgacggtttcggagtttcaccatgcgatcctttggctgctagtcggatgctgtgtgctcgtctccgggtcgttctcaacgagtgttgatttccaaagtttgagaattctctcaatgtgggaaagttgcattcgagctctatactcagccactcttataagaagcatgtagacccacccgagttaccaaatttccattcttattcaacgcaggctcgttcgccgtacgagtatgtatgtaaagaacgagccatgggaatggttctccgcgcacgatacactcctgctcgttgactgatgcagctgcgctggatcgaatatagcgccttgctccttcattccaacatgaacttgaagctcaaaccaaacccggttgaataaaagctctgataatcccaaaagtaacgctggtctgctcgccgcttccgtgaacgacggaacgaggagattcgcaatgataggatgatcatataagaggttgaggttgatctgagttcgaacgtagattccccgcataggtttcatgaactcgtcgggctatttttcgattcggagcaatccgcgagacactaggaggttagcaatcttctttgaccttcttcccctcaccgcaggatcttttcgtctagttatggaaggccgaagcagcagaagactaacccagtcagcggataaggagtccaagaacgccataagacccgaacgccgggaaaaagctgacgtttccaagtatgatattcctctcaaaatcaagaaacgagtcgagcaggagtataaaaaaatactcacggctcataaagagatgagaactcaacaaatcatcgtgagtatcccaggagaaaaatgaggcctcgtcatcatgaagtgcaactgcaacctatctcgagttgtgttcttcgattgcctatgaattgggagacgattctcttcacgcaggaaaaatattcggacaactgccgatacattcagagcacgctggacgccacgagaagcgtgaagaaatacaccagacgacccctatcatcattccccgagatgccttcccagggcaaactggggaaaaccgtagcgatcgagatacagaacgaaacgaagcaaaccgtcccctgcagactgatgaacgcagtccaatcgattcccaacatgtacacatgggctccgacccaacaaaacttcctcgttgaagatgagaccgtgttgcacaatattccttacatgggcgatgatcaggatgacacattcattaaagaactgattagcaactacgatggaaaaattcacggggacaacgactgcaagaattctgtgaatgacgagagactcatagaattagtccacgctctcatgaactacgaagatgttggaactatgtacactcccaaaggtaatccgctttgtctcgcctcctctcgctgttgagggagaattgttcttgtggtgtagctctgcccctcctttcgaccgaatctatttcccccctcaagcctctggccgggactcttgcgccttgattcatgcgtcgcagtctcaaactactctccacttccagagctagaagacaattcatcggatcctccggaatatcttttcgcatgtgtgctttcgatgtgtccgtctctggctgcttcgccccatgatcttctggaaaagtaccgccaattgaccggcaagggtccgaaagtaccagtcgggcaatgcacaccgaacatcgacggctgcaacgctctttccgtgccgcgagagcagagtatgcactccttcaaggctctcttctgccggcgatgctacaaatacgattgtttcctccattgtgagtaggaattagagaaatttatgtttggaatttacaccaatcagagttgttgagacccggtcgctgatttgacagtgtgggtggaaggcatcatcgcgagtcgcatttcagctcaaagatccgtgccgcaacccaaacgaaggtattacgacatgaaagttgacagtgaagcctgcggggacaaatgttatctgcacctgacgcgggttaaagaagagagagcccaagaggaaattgaaggagtccagaacggctcggacgagaaggggcacgatagtggcaacgagggcagcgaagacagcagtgactgtggcattcaacgacagaaggtcactgtcaattccttagcgagtaagtttccgtgtacctagagagatagcaaatgttcgagattaggttacaaagagaaagtcgtcatagaacgggcaccgtcgagaggggcagatactaatcgggtcggagctagagcgaagagcaggagcacgaacggagaacgacccccgcatgggttctccttaacaacgagaacctaaacgagggaattcgctgaggagtaacttcctccgttctcatcgacaatattgctgctgtacaggcgcttcccagattggtagaaggaacgtcctgtcagtgttcgttctcgttggctccctgaataatgtaagggagtatgtcgtcagtaacattgaatattattgtcaatcctagaacgacaatttcgatccacgaatcgcagaaagtcaccacgtacaccatcatgcagttacgattcaggtacagggactcgcttgcgaacgattggagtgattcttccccagaatatgacccttggctgctgcctccggccactcgcctccctccagcttgctgatttcgcgccccacccacagaaccaatcttgcattggatgttttgtttgaacccttgtcagttttctcgcgctttctgtattgtgtggagctttgctcagttggtttggaaccttcacgcggcgcatcgcactctgtacggttaaatgccctctagtaaaacattcgggttctttccgcagactcggaacgcaccaatctggctccgtcgtatcctcacagccagctcactgccagggagctagaagagagctggagtcctgccgaaatgtcgatgtttcgtgttctctcgaaacccttttacaagaatttctgcgccatgtcagcaatccttgtgtccaaaacttgcgcccaagtttacacgttcgcgcagatcgagcaatccgaggtccacctccctcccgaagctgaggacgaggagagcagacgacagaagaaaaagaagaagcacaagatgtggtcaacgcattcgaggaagttccaggtcaagaacgcgggttcgaatctcgcgtgtcaatacatgccttgcaatcatccggggcagctttgcgatcagaactgccgatgcgtccaagtcggcttctgtgaaaagttctgccactgcagccctgactgtgatcatcggtgagtggactcagcgaacgcctcgctgctgctttgacctatgtatcatctgtaggaatcgttgacatctcgtggtcctcgatccctgtaaccgaaagacctcgttcgcccaggttcccgggctgccgctgcaaggcgcaatgcaacacgaagcaatgtccgtgctacctcgccgtccgtgaatgcgatccggacttatgccaagcttgtggagcagatcaattggtcgttacaaacataacctgcaagaatatatgtctgcaacgagggctgcggaagcatctcctcatggcccccagtgatatcgctggatggggaatttacctcaaggacgccgcggccaaaaacgaattcatatcagagtattgcggagaggtacgcaaacattcccttctccggttcttctgatttcaatgcgtgactgacttcattccttcacaatgatatgagcacgaccgattcagcttcgatgattcacgtctccttccagatcatttcccaggacgaggcggatcggcgaggcaaagtctacgataagtacatgtgttccttcctcttcaatttgaacagtgaatacgtggttgacgctactcgcaaaggcaacaaaatccgattcgcgaatcactcgatacaaccaaattgttacgccaaagtgctgatggtgaacggcgaccaccgtatcggtattttcgcaaatcgaaatatattgccgggagaggaactgttctttgattacaggtgagtattcctcgtcgggggagtgcctgatcaatcattagatcttggaccatatgaacatttcacgtgtgttcctcctgttgcaggtatggaccgacggagcaactgaagttcgtcagtattgaaagggagatcgaataccactagaggagtacagagtcgtaacctgccacgatctgtaatgactcaacgattccgatatttgaccgtcacacatcactgccattttctcgatggagttggggttttttattgggagagcttgttttccctggagcggtgatcgcgatggctgagattcagctcgttcaccttgtacatacaaacgacgatgatatcccaattagaaggcgaggaggactcggtaccgattgaacgaatttgagaaacttctcgctaggaccgaggaggattctcgagacttgatttgccttgccccgaagtgacgatcgagtgaggtacggcaagatcgaagtagtgattttatatcaggaactgagaaccattcccttcatcaaaaaggctggacgatgcagcatatcaataaattcaactatacgaatcgagtttattccaatagccgcaccagatgagagttgtcaaaaaatgattgcagccgaaactgattccttggatcggagttccagatacgagactgttttcgagctgatctaccatgaagtcgttgcatgcctggctgctttcgctatcactgagtgactcaaagttacggacaccagttgatccgggccacaccgattccaaaggatctttgagattgggatcagctaccttcccattcctgagatgacacatcggggcattggatacgatagctgtgctcgtggatgagagatgtggaacttcgcaacaaagtgactccaaaatacgtcccgctttcggaacgcttagctcatgcacctgccgatgtctcatatttcgccatcgagatctgatgtctgaaatggagatgtatcgcggctcgcgagctttcgactgcaagccacggaatcggagactcgggtgcggacatgactcacagcctggctcgatcgaaggcgaaaaccatctgcgacttcccgtgtttcttccgagcaacatccgataatgatggaatctactcgtcgaccgaaatggggtgggtcatacactcgcgaatcgatgggagaatgcgatcaagctgagaatcacgagtcactggcaaccagccccaaacggccgaagatggagccacggaaggaaaacttccccgaggacaagaagaaaatctgatcccgcagtccaggctctgcgagtcgctttccgattgagagaagccgaagctcctcgttggcgccgtcccctctcgatccactcttcttcctcttcttctccacgctcttcttcctgtgccccgtgggaagaggccaacacgcttctcgcaatcatccaggttccagctatcacttcatcgtcatacgccctcgaatccatcctaattccagggtttcaggtcctcatcaacttgagcgggaatacgtggttgacgccacggataatggcaacgaaatgagatccgcgggtcactgaaaataaccgaatcgctacccgaaagatttttttgataaatgtcaatcaccgaatcgacattctcgcagagcggaagatgatctatgatcagaagggagcacgcgtgtcaaatccctatattcatcagattctcgaccttttcggagtacagttacgtctcgagctacgtcgttttcggacttacgttggtttttcttttttacttacgtcggataagaatctccgagagcttgttatcgaagctctggctcagtgaacatcgatcaaatttgagaaggaaggtttactgaactctccttcctagatgggagagttgatataaggctctgaggtagttctagatccggttctatagatcgcaagttagcgctcctcgattcggagctcgtgtttcttcttccagcatcataacagtgggggaacgtccaaacaaattcgaattctcctctggatcccatggcttgacgatcgcgtgttagttgctggttttgctctcaatcgaacacgaatccagctataccgggggcattccagaatccctcacggaaagaacttgcacgcatggattggctcgcgcagagacattattctcaaaagccagcgaacccctctgcgatcaccaacgatgatgacgtcgaatgcggcagtgaaatcttcctgacaacggagtcattctcccaaactgagaagatggaaggagcttccaatctggtgagggagacactcgaaggcaaatgttggtgctatataaagtatgcaacgatccttgggagggtagcagtctctgaatcatctgacaatgaacatttacccagcatcccacataggtgctttaacccatcccgtggccctgctgtctgcggcccatgtctggcatggatcagtgggaagcaagtgcctgggagcagaagcttgtcggtcgcttcatcgtggctaaagaggagtcgttcctatcgacaccgggtctaatcgtggcgcatagcttgaactctcgatgatggcgccctgtaggcttctcccaatcaaactgagggcagcttcggctacgttgatggcgctcaggcgccagatctcatcgggaacagggaaccctccggaatgagatgaagctccatcctgttacaccagaaactcctacatcagagatctgtgattctagtagctactccacaggtcagggaactaggagctacaagcaaggtcatagctcggtccagtgaatccatgagaactctccgggacttgctgtgctctgagtgaccttcatctaggacttttccacctgtcggacctgagaaacggcggaataaaagttccccaggaacaaaggaagtcttccaacaagggatcatccggtcaggagctggggaggctttcccatctcattccagaacaggcgaacaacggtcgcaggctgggagttcacagcaaggtaaccaatacaatggagacgagcgagaatcgataggccaagcgtggtcgaataaaattcacttcgatcttccagatactgaatcatattgtagccaatcatttcacggactattccagggttcaattgaataattcactgtgaggatacagcccttcactgggatacaaacagtggtccaagaccggaacctcgagatggaacgagggaagaatcagtcggaacatttccgccttccaccaaaaattccccttgcgctcaatcttcggaatgagcagtcctcggagtcaatttgaaaacgctatttactccctttatttacagaaatccgaagcgccgtatctcctggtctcttcggcggcggggtactacgatgcgccgccactctgaaaatgttgtgcatatgaacaatgctgatacatcatcgacatgattggatggagctcagatcgatccaagcaagacagctcccgatgtgttcgtcagatctctctgtgggtgaactcgatagaacattcacggattctcaccattataagttctgcttcctgctctcctaaagccagacgagcatatctcctaggcaaaagatcttcttcgatgcccgagcctcgagccgaagcgccggtcggagctgagactttcgggtctgctcgggcggctgaaaattgagctgtggcacacacgttttgtgattgggaacgaaaccgaaaaacaaaatcaaagccgtagaacatgcgggttttctcgaccgaatatcagagggagacgtctatcaggatgctagtaaccaccaactatcatcttcgtgctaacgaggctcctcgatgtgtgaggctcccacagcctgtccgagagatttctcgatagcttcatgaactcaccggctcgtcctcctttgaggaacttgatcatcggaacatgcggtcgcagcgcctggaaaatgtcccgagttctttcagaacctgaattgtttctgtgatggatgcagaacagtgggcgaacgcgttccagaaagtcggaagtgtggtagagtcgattgcgctcgacattatgagaattggagtcgatgtcatgggatagcccggtatggtcaacaatcaataccctggaggatacatccaacggaacgaatggattcgcccattccaaccaactccgtattcatcaataatgcggaatccgcgaaatgtgggatgagacaggtgttctattctacctattgaccttcatctgagcgaaaatggggaaaagttgtacactcaaatgccgtataaaataaccgatgctcttccctggtggaatgcggagccgttggagcttaccttcagcacagaaccagacccagacatattcacaggtagagactttcaatcagcgcaactcgttcgggaaattgaggagctcagagcattcaaacggagggtataggaagtttgtgccgaatcgagttggatggacgcatttttaaagggaccgccgaccgctaagctggcggcgcgttcgctactccgtgtttacatgcgcgagaccgtgctcacatctgtggcggagaattgaaaattgacgcaggcgcaaaaaaccctgagaaagcgactataatgagcagaaattatcgaagtctgaggtagtcctaccgcctggacatgaagtatcggagtcaccaaggactgagcgaccaacaggtgacgctatgtactcgaatggagacgacgaacgtcggatcagaggaaaaacatgcattcggctcagtactatacgccgcgatcttcgatacgtctacgatgagctaaggcagcatctacagagaatgtgaaccgcaattcccggatcgcgagagtacgggtggggaatgtgatacttgaggagctttcgttattgacaagttgtaggagagaagagcgaggtggattccagggactcggaagtctcctctgagtgaaacctaaacattcgaaaagctccacttcgctgcctccattatgattcctgagtccagaaatcagtgcaggactggctggaacgtgttccgaggctcggacccgccgctgccccagccccaaagcgcttgaaggaagagacatgtttccgctcggtgccaactgccgcgcgctggatgccgcgcggtggcgtatagcgcattcagaaaattctgtcccgtcgagtcctgaaacattgcccgaatcgcgcgagaagaccctagcagacgagctggctcggaagtctgagtctggctcgatagcatactgtccgcagaggactgtacagtcgattccaacgaagtgagatcaataatttgacactgagagcagacttcaacgctcatgaacaccgtcaagttttcgatccggctccgttggaatcgactgcccagtcttctgcggtcagtaatagaccgagtcagtactggaagcagtagtgtaacaaggggaggggcggaggggcggaccgccccgggcaccacctgaccgagaagcaccgggggcgccatttctagcttcccactggagctcctgaacttcatcaggaagtacaatctcgacatcgtcgtcccaaacattgacatttccttccgcccctgtctgagcgtagctttaagctcggtaagctgtgggaggagattcggaattgatcaagtcatatcttcgctccactatgaggcaactgcggctctctagcctggcgattccgtcgatcgagcatgatctatccaataacatcgatattggcgatgcgatcaatgaattcgcggtcaggagagccttcaagggtcactttttgagcttggatccgtctggatgataaacctggaggaatcagttcatctgatgttttgatccatgcaaacctagctcatgttttctgactaggagggatggggggggggcatttccgttgaccgccccgggcgccagagacccttgttacgccactgactggaagtgtcgacctgcaactcctgaagtgacaaagaatacacgaggcgtccgctcctacttcaactgtgttagccttgagcttagatgaaggagagtctctagttggaggggccactgtgtatgtcgcttggaaaaatcgagggagggggtgatcgctcgccactgttcccaatcagaagccacggaaggatctcagttcttgcgatccagcccgtgatagaaatttcagtacccccctgatctagagccatgagaaattatcttgtaggtctgggaaaatactcgagaagtttgctcatgtgattcaactcctcaggtgaatggctgtgctcactgaggggcctcgggaggcgtccacctgtggaaatcctggcggtggcggagcacaggacgggccttgggaggtaatgataacggtaatttgcagcagaggcagcattcacatagaagagggtgtcaagaaactccctctgggatacataacgtgagatattgttgctgtcaagttaagggtcgcaccgtcggaaatgtttacacctcaagacaatcattgttctgcacgaagttaccgtcttcgtgtgggatgctgactcgccgctccccgtggcgtgggcagttaggtagcggccccgcggatcgtgccaaacgggacgtccatacttactcccagcactgggaacgaatttttttttttctctctccttagtaaggcgatgaagaggcaatgagtatagacagattatagcgtgcaatatctatgacactgattttctttcttttgattgttttttcttgctttactcgggcttcggaccctcatgatctacgggccgcgtcgcccgcgtgatccctggcatcgaggcacttatctcgctcttcagtgggtcagcatcacggttttgaaaagtatggtctgattggtcccggaatcacccctcccgattcggagaagtatgttcagattgatctcggaatcacccctcctgattcggagaagtgtggtcgggttggtcgcggaatcacccctccacttttcgaaaagtgtggtcagattggccccggaatcacccctctagacttggagagtaatggtcagtttggtcccggaatcacccctccagacctggagagtaatggtcagattggtcccggaatcacccctccagagttggaaagtaatgctcagattggtctcggaatcacccctccagagttgggaagtaatggtcagatcggttccgaaatcacccctccacgtttcgaaaagtatgttcagattggttcgggaattacccctccagcttttgaaaagtatagtcagacccgtaccggaatcacctctccagactcgggagagtatgttcagattggtcgcggaatcaccttcgtgtcttccagaaaaagtgcggacaaactgacaaactgacagactaagccgattatatatagtaaggatgggccgattcatcgattcttcctgtctttccgatgctcatcagtccacacggacggaaccatcgcgggcgaagttgtcagcgtcttctcaagccccgaactcgaaaagttcccttattcctgcccactcggagacccgttggatcccgaacaggacttgccgtttgcctcgccatgggaaagacttcccacgcatcgcatgtttcccgtgcaatcagctcgattcaaggtcacattgataaggaaattccagaccttccggatcgtgcgaattcctctccaggttcagctctactccctctagtctctccgacgattcccactgtcaccgccatcgatagccaaaggcgagagaaggacagctgcggtttctgttgcagagcaaggttcgaaaaacaagaccgccctccaccacgggaagagcacgtgtcgaaccagaggtgatcgaaacattggtcgaacgctgtcagcaaggtccttcgaaggaaaccaatgtgacgtgaccgtaaccaactcttgcgagtcgacggcgcaggccttcgaacatcgcggcgcccgtggaagactccggctgaggaagtcggaacagcttgttccggcgctttcgtttcctagaccttgcctctttcaacttgcgttcgcccgcatgagctgcacatgggccctccaaaggtccgcggatccgcgaagatttgcgttacagaacgacaggataacaggattcttctctgagcagactaggatatgaccgccagaagacgaaattttccctcccctgtccggaacgtcgagagatttattgtagagaacgagggtcacagaactccgtgccgcggctcagggtgccgcggagcaagcggtatcgaagggtggcacggggtgtcgactgtggccaaacgatgccttaccttgatttcatcttactttgaagatgattttgccccggtctgattattctattcggccccagtcggcacctccatgtactacgtatgtatgtagacctcctcggctgcggcaccctcggcaccctgggtgccaatgtcaagaaagttcgacgacgtctggtatagaatgtacattgcttctggtacgggtgcattcactgccgaacgatagccctgaccggcgccagagaaagcttcaatgcacgtataactggtcatattcgggccccagtatactatgccgagagaaatagtgaagggatgtcatctcggacgagccctctcccgagcaaagccagttgttgaagcatgggcagctgcctttgagctactgtggttcgatacttggcaaccctcgtcgttacacacaccggggaactcatggtagaactgtgagatataaacacgcggcggtcagaagagaaggaatttcggattcaaatacatagaagaattaattcgttcgatgcttcccatcacaatgcatccagaactagtagagcgagctgcatggctgccaccagcgggctccagaaacgcgggcgattaccagaacgaaaacaggaattccgtgtccgccgtacgacgatttcctcacgattaaatgtgcgcgggtttcgcgggtcctgcgaatccgtatccgcggaccttgatccgctgcagagcacaagaaaactactctacgcgattgtcgtgctccattgaaacctcggtatgccgctgatgaacttggtgcatctcgtctcatcgttctcttttcctgcccgtcggctgtcacgcagacttgaatgagcgagacaggaattttacgattgtactttcaatatgttcaaacactcatcagaaatgtacagattgtaggagaataattgtacggaatataataaaattatcctccgcggagaaggacaattagccggtgatccttcagtttacgaagagtaaatcttcaacgttctgtcttgactgaccgaagcaacaaacgatgcgtgatgaccaaatctcactcccatggcctcggcagtgtggtcccagaaagttgcgaccaggtcccactgcttgctaagatacacgcggacatctttccccgccacagcaagatactggccgctctgatcgaacgtcaggtcgttgacagcgtagcttgcgtcgagctgtattgtcttgatgtttttcagcttccgcaaatcccaaattttcacagttgagtcttcagcagacgtggccaagtagtatccgttctcagagaaggcgatgccagtaatccgtcccgtatggcccgggaagtaggcgacgttctgtcgctctttcagatcccagattttgatgagggagtccgaggttccggttccgaagatcaacccgtcaggatggaactgagctgctgtgagagtatggccatccacagcctgtgggtcgttgactttcgcgaggatttttccggtgcggatgtcgctgaacgcccagtagtcgtcatcggccgttgtcaaaacgtagtccccggttgcgtgcagagaaagcgccgatacgggtccatcatgagtgcggagcagctgagtggtttgtgaggtaccgatgtgccaaatacgaacagtagtatcaggactcgctgtgatgacatgctctccatcgggatggtagatggcatgggtgaccttcttctgatgacccttgagcaccgtgacaatctgttcgctgtccttgttgaagatgacgacctgcttatcgtttcctccagtgacaaacttggagctatccttggggttgatgtcaagagccagaattccaggagtagacgaggcatggatagaggtttgcgactggaccgttttataggccttgatgtcatcaggcttggcgagttcctcaggaacgttgcggccgcgcttcttacgctccgccgtgagaaccgtagcgcgttcggaaagtttctggaaaagttcaaggagggagtcagacattggctcaggacggcgaggacagggcgtgtctcagggtttctggacaatttcccactaacgctcgaaggaatcatatacctgaatgacgtctggactcattccgataacttcatctttggacgtgggagattcttggacttccatgtgaacggcttgcgctgcctgcggttttagtgtagccaaagcttctcgagcggcagtgacctccttcgtgagacgtgcgatcactctgcaggctgcatcgtgctggtacaaagcgtgtgacagctcttgacgcgccgtgtgcagctgctgtcgcagcgaaaaactgttcagcattacagcatcccattcgtcctgaaacccacgcagcccagattaggattgaggtgacattgaacatggtacgtcgatcgttaacacttcgtgtatgtcgatggagccggcgaggagcgtgatcaccgcatacctggagtgccttgagaatggctggaatactcgtcagcgaaggcggtctgggtctgacaagcgacggagtcttgatctctatgagctgctccgccgttagttcatgttggttgactggatcacatccgttttctgagatgtatttcaatatgagacgcttttcgaacacggacccggacaccggcgagatcacggggcattctggagcctcgttgctgagtgcacacacgagtgccatcgtcaggaacgttcaccgtctgaaatgcgggttctgtccgctcggattagctcttccaaacctccagatgagcgcaatgcgtgctataaatcaacaaaacgagacgccggcttctgctaggcctaaacatttgctcagagcgtttctcgaacccgagagaaacccacctcgaatgaggaagaatcgaggagactgtgcagccagccgaacaccgttgcgttgagaattgacggctctcttcgccaactgctaactacgctcgctcctgtgatcgcccttgtatttccgcacaactgtattccacaagcaacgcgccccttctcgcatcggcatccagcgtacgatgaaaacattgaagattcggctggtcgcgcgtgtgatatcccatggcgcgaaaattcaaaactcggaaacactagaatctcgattctaccaaccaatctaagcatgccaatcaatcgaaggaaggagaacaatcttgtttgcagaatgggaagctcatcgaaaaacggcagaaggcgagaggggatgctccatgtcttggcatgggcaatcttcacagatgtcaccacggcggatgataaccttatttccacccctttgacgatatatttccttgagagaaagccccgcaccacgtcattagctctggaagcacttgcctcctgagccatctgacacggttgttggggcaaatcgctcattctcagcccgagtcgtttctgttcttgctgccggctcatcactgactcagatcgctcatcgatgatgagaaaacgcgattgaatcaaactataccagtgtttaatggattcaaccactccaggatcacggttggtgatgcagaagaagcattgagaaggacagccagtcctttcttgtgagggttcgacagtttagcgccccaccgacagcgctgcgtccacggaagagttaggaaggtctgcggaaagcatcagcaacacaaccgaattcctatgcagccgtcgagctcaagcagaatgcttccagatcagagaagctgaatcgaagaactcgagcatcgactcgacgcgctcgtgtaggcgtgagggagagaggtaccatggaacatgcctccgtgggagctcctcgaattcctttggaggtattctatctccgaaggggggttgttcatggtatcagtcgccatggtgacaggggtgaagagtgcttgtgccaagacatggagcattcctcttcacctttcgccgtttctcgaagacctccctggaacatgtcttggtgagaacgcctccgacggagcgtgtttcatacaaaaaagcttaggtatgagcggagacaacacgacgggcatgatgatcgaaacaaagaagatgttgaatgaatgggtatcggctgaccggcgaattcgtccacattggtttcgagaatttcatgagaccgaactttgccgccgttcgtctccttccgagatggagtataggaatgtttgtgccaagttccgtttcagaagaagcgttgtagtgtcgaccgggaaggagacttctcagatgccaggtttagagacctatgagcatcgatcagattccatcgcccggcctaatcctccagacacgggttacgacttcaacaattttttttctcgtacgaaaactgtagcgatagccgctgcgcaaacggatagaatttcaaccctgatttgggcgcctctcagccctctggatcgcgtttcagtttgcaggacaaactgcgattctagtttggttacgtacatgaggacaacatcagctgcggtctcgagcttcgcgcctcctcaaatctgccatctctcagcgcacgagacgggtatacgaaaacatcaacaaacgtagcactgcgcgaagcattgttgaaaatctgatcagtcttggagaaaaaatcggagacacgcacacgattgtgtcgtccatgtttataagtataacactgtccgacaaaaaaaaaatcgcgtaacaaagaagctgaaccctgggtcggggtgagtcgaggtcgtagattccgaatttgtaaaccgtttcctcgaattcgctctagttttcccgttattccaatatttcggatttccgtgattcttcttctgttggattttctatatctgcccgggagtgagccaaactcatggaaacttgggagcatgtatacatataacagaactatccctggtagaaaatttcgtgcgattcggagccacggtctctgagctaggagagatcgaccgtcagttttcgtcggagaacaccgaaaagtttcctcttcttcagccgatgactgaaaaagtatcgttcccacaaccaacttccgtggggctttttgatagcaattccattcacaaacattttgggacaaagttgagcgtgatcggatgatccattcagttttaatccgtaaaaaactggacacaaggaaaacaccccttacctaaaactcagagctccaccgctccgagtttcaagtgagctgtgagccggcaccacgttttggagaaaacagcgggaagaatcgatttgcagtctacagagctcgttttcgctagttcacttggtcagtccactagactacgtgaggactacgacgccatcgcgtttgcgttggagaagatcaaatacgaggagcatcgatggccagttcgtgtcgacttgaaaagtggtctcgattctcttcaacaagccggcgaacaagccggttacaccaaatttccgtgcttcttgtgtctctgggacagccgagcggatgacgaatattggattcgaacgatttggccgtcaaggggatttctaagacccgggcagcccaacaagctcagagacgctttggttccgacggaaaatatcattctcccaccgctgcatatcaaattgggtctgatggaacagttcgtcaaagcattggacaaacacggttcatgtttcaactacatcgtgggcaagctacccgctgtgagcatccagaagcttcaggcgagggttttagatggacctcaaatccgagagctcatcgacgaccctgttttcattgactcaatgaaccatcgagaagccaatgcttggcggtcatctgttctggtcgttcaaaatttccttggaacacgagagctggaaactacgtacgactagtcaagaacatgctcgtgagctttcgagtcctagggtgtcggatgagcatcaacatgcaccatctacacagccatctcgaacgcttccctaaaaatttggggtgaacaaggagaaaggttccatcaagacatagcgacgatggaagagaggtagcagggaagatgggacgtgcacatgatggccgacaactgttgcacccttatacgacccgaaaaggccccactcgaggcagtccctcacgagaagttttgttggttccgacgagtttcattaactttcgttttttctgcataaaaactggatggctcgtcatatcacgctcaaatttgtctcataatgttcgcggttgaattttctatcaaaaagctcctcggaagttggctgtgaggactatagttttttcgtcttcggcaggagaaggggccacttttcggtgctcaccgacgaaatttgacttttgatctcttctagctcactaaccgtggctccgaatggcacgaaaaccagagagagttctgttactggtctcggttcgccccatcctagttgtcagcttccttgctcaattttttctgtcgggcagtgtaatacatagaatatatatacatttacaccaaagaaagtcagatcccgtgtatttgttcgtttctctgagtgtacgcacgaccggtacacgaaccgtcacgatgaggcctgtcgctccgattcaattccggaaagattccccggcgtttccccgaggctacagtgtgatttttagggcttcacagctcagtgggggccggctcggctgagatatactacgtaagccttcgtaaacacctcatcctaatcgaatgagggccaagagctgactgagacgtgattctggtcccgtatcggcttcacgcgcgtttttcgacttcagcagaggacggcatcaatgcggcttcaatttcttccggtctcgctcatatttgaggagaggaatgagagagcgagaccctactctgcaggagagcgggagccgactcgcggcgatccttgttggtaccacgcgacaacacgctttgtgggtccatttacgccgctgcaatcctcgtcagacggcgcggcttttaaccatcgcatcacatagccctcatccaggtgcgatggctcgcaagtgacgtgtccgaaatatcgtggatcaacgcgatcggcatctctcctagtttcgtgcttgctccatctcgagcggagaaaagaccgctgctgctcacgtctccgtcgctggtgccgccatcgccagcctccatcaagactttacagctgagcggggagcagcgacagcgatttcgctctgacagcaggtaggtttgtagcgaatcgtcgggcagaattgtgtttctttttgcggggatctgttgtcagtacagtgagccgcgtaatctcaagattgaaacggctgtccagactgatgatcgaatgagtcagccagattgcaagcaaggattggctcctggcggatcgatactttctggtctccgtgctgattaggatagtggtttgtaccgctgtcacggaaagccccgatctccacttccaccgccctagacatagactctggttcatctgctctcatagttgtgtaattcaaacgttggtccatgacgaaacttcgattctttcgtgtgcggagtgcgagcccaggtcttccgcgttgtcctgaaaacatttttgctcgcgtcatttcggaaacttcagcgataacttttagctcttcgaacacttgagaagcgcgagaacgtactgttctgtgacctcggtacacctagcagtttccccaactgtgagacttcttgacaggcctcaaccacgatctcctattgtatgttgtcggatccatccaataattcatggggaaatgaagtgacaccagcagagaaactcccgaatcgagcttccgctggaagataacgtagacatggattttctcatcaggatggcgagtcagaccgggagtaacggtttagatttgaacgccgccgtcatcgcactgttccaagtgccagacacgctgtaccgggcgtgggaggagcacgtcccacagactgcacaggacacgttgtcgaaagcttccgaggcaagtggcgtgccgaaaaaatatctgctctgtaagtgtggggcttcctccaggactcaatagctgacatatctgccacgctcatcttgagccggcatccaaacggattccgtgtgcttccagggatagtgctcacgttaggattttacgtcctgaccggaagagccggggacatctgctacagggtcgtggccaccctataccctggctacatgtccttcacagcgttagagtcgtctaacaaggaacgctcgactcgctggttgaaatattgggtgatccacgccgttattgaattcgtgtgtttcttcaccccaagcttcatagaccgactcgcttccatctccatgatgaaggtgagttctcacgtgtatagccaagtgctgcagcgcatcgaccgagaaaactgcgaaccccttgacccgcgagtcgatgctgccactccctgtgttcggaggtctgtcatgaacatgtgcacgaaaactccccataaaattccgtgtcgttgagccctcgtcatgtaaagtgcagtccgggagcatcagtcacggctgtgattggcgtagagagcgattctctccagtctcgagcagagaatcttgctataggagctcgctcacgagactttgtatcagcgagaataaacaatttgtcgggaaacgtgacgaaaccacatggacactgatagggttcccgctcctctggcgaatatctctcgagattaactcttcgtcaacgatgtgagagctcaggtgacggcctcacctgattgattccggatgctattctgaacttatttgctcttccagacaatatttgtgctgtggtgcattctaccgatcaaaccgtcggggaccgacattgtatacggtagagtattgtcccagtattatgaaccattgaagaactacttcgaaaacaaaattcatgacgattcccgtggcgatgcgcaatcagatcgataataccgtggatttaggctgacctcgaatagacctcatcggaacaccagttgttagtcatcggcggctacccaatagtgagccgcgaaaaccgactgcggttgcgatccctcgttcttgttcgattgaatgttcacttgtgtgggatcttgtggttttgtcatgtccaaagcgggactcttttaaatacggctatttcgcgatttgtcgaagcttgccggagtgaaaatcgatcggaacgacaaaaccactcagtacctcctcatctctgtcgcttatgggtcgaggagattttatggatgaaagtgttttattttttctgcttcgtcaccggtcgaagatgttcgagtgttcgtattcgttttttgcgatcctgcttcttaacaactcgaatcctagctcgttgcactgaataaacacttttagatatttctaagaaactaactactggattggtttcgtaatcttcctcgtaactctgaagctgcgctccggtgtttccacaggcagctcgagatttttttgcccggaggcacctcgctccgggctctatgttatcatctccctgcactcctgaggttctctcagatcttttaaaactctcattgtgatttgccctgcagaacacctagggggagtatcagagaaagtcaggcagttggcaatcgaatccgtgaaactactttccgaagacagccacgctggcgcggcttcggatgtcaccgaagcgaggttggggcgagctgaatctgatcggggatccagagcacaccgtgcgcgcagcaagcgatcggcttgtggagacgaatcggcccacaaagtgcgagaattacgtctgagacatctccaaggccgtaagagtcctaaacaggacccagagacgccccctacagccaagatgcgatcgcgtcgtgatttgaaaaaccactcgcaagattcgcctgaagacatacttcagaaagacgatagcccggagccgtcaccagaaagatcctggagcacagagccggacgcaccagaagaactggcaacatcagcaatcgagatagccgaacccgagctgcctgaagaccttgacttaatcgagtccccacgagaagaaagccgtgggaaaccttcgagtggtaacgaagagatacgaagtgagaacttatttgagcagctcagtgcttctgccaaggtagaaaaagacacggaagcggattcgcgaaatggtaggacacctcctgaggaccgtttagccgctgaacgacgtttggccgtcctgaagagagcggattcgaaagtcctcgctttcatcgatgagaagagagcctcaaggtataggaagtaaacaggcttccatgagggtaacatgatcgaaactcaagtgttttcattgctcgtgagctggtcgtagcagttttatcttgcagtcactcaagtgggttgccgatcaagttcgaagcatgccatcatcaagattttggcaccgcaacgaattttagctccataagtggctcattgcgctccttccaggatgcccaagttccctggcttccgttctgaagattgccaagttttctcatgcgcctttggatctaagtgcgaagttttctgggcgccaaatattacggcgtgaatggaattatgctcagagcagaaaaaccaggcgtcgttcgccgtggttggcacaatgaaccaacgcgttgtttgataactccatcccacccgtagccactcagaatactccacgggtcgaaacatgttccatcgaccgttttcctatcgacttgttacgagtagcgacgtcgaaatttgcggtgtccgatattcattccggagaaattccatcagccggaatcaagagtccgagatacgatttcgagatccatccctgacttcgaggacatgattaaggaggtcgatttatcggggactcagcttgattgggatgagacaaggaaataaaactcctggtcagggaccctcgagtcaattcgccacgcaggaagtgtcccgcacgtttgaagggagacggggtctctgaattcgtcgagactcccgtcggaatatcgaattagttcgggagctgcagagattacgttcacgacagattccgacggaactctcggagagaacagtcgaccacacatgcctcgacccggaaagccaaccccttcgtcgcccttcctctgctggagatgatttcagttagaagaagtcacgaaaggaagagtttccgtcgtcgctcttggtgactccgctgcgatggaagaagatccctggaaccgatcacatccgtctctgacgcatcaagctcggtgcatcttgatcacgctgactaagacgtgcagcatcgtcgatttccgaagagacaacagcaggagagctctcaggcggcgtcacgactgcctgctgcaagaccagaaaatttccaggagaagttatatcagcggagtggagcctagaatagtggttaccgcaaccacctggggtaagagagcggttgggaaatgaaaacatgagagaatacatggctttttaaaagttaccacatttattcctggtttattcccaactcggtctcgatgcagcaccatgcgatgtcgtttctgctgttcaatctctcattcgtgattaattgttgcggtaaattgttttgaaattcatctcctcaataatgtccgacgccgattgaagtttgctgttgcggtggtggctgtgttcttcgacgttaatatttcggaaacctccaatcgagagtgcttacattgaatgcccttcgaactgaaactcttcgctccgaatctatgagaatcagggaaacccgcagcttccggcgatcctcgctgcaacgctcaaatttcctaatcacgcacaattcgaatttgaccgcttctgtacgctctcggacacaatcccgatttacagtttcacactgatgttttcgggcgtgtatcatgaatgtagaacttcgttttcaatgccgtatcgcactgcaaacgggccagccaggcgaaaccaatagacgctccatgtggtgaactttcccctttccgactcctggctgtcaatcctcctcacattcccccttcttctctcctctgtttcggatttaattcaacactccaggttgcagtggctatacaactgacaagcggcaacgctttgtgaatgaagatttttttttacatttttctcctacgtcccgctccgacgatcttacacttccagccactcaatatttctatcatccttccattcatcgttttatgaactaacctcgcgttggattttcatcgtcatcgacgtcacaatcgtaaatgtcgtcgatcttagagaacggttgtttcccccatgatgatgatgattattcgtaaagtaataagagtaataatcatcgtactcataataatatgatgaacctacgtcgtgcttcttgtgtatttcaagacctagacgctcacgtcgctctcgggagtctgcatccatcatcactcgaagggattttcccgtcttttgcgctccccagctcgcaagattccaaagggtcgtgatatcgttgacccgtcgaatatttgacggacgctatcactattatcatcatcaatacgcttatcataaccatcatcacaattggaacagaacatgaccacgactccagcctacatccgagtcttccgttcaaggaccaatccatggttccctccagaagaatcaaaccgattcgatctccccgcagtgaagaaatcctcacggggttcgctccgacaagttttcatcctcttcatacgagctcgcgctctcgctctggctcaattgcctctaacgaactcgtttccaatggctctgcttgaccaatggtatcacgacatttacacgcttcgcgattcggttgttggttggtgttcgtgctcatgttcaagtgatctcgacggctgtctaatcatcttcattatcatcaatcatcatcatcttcggcgaggtggctccatcagtttgatacaggtcgggacgagatttgggaccagggagaataaaatcgaaacaatgtccacagtgaccaagcaagcacgtggaaacagacgacggggcgagcctccacaccgtctttcacatattgcaaacccgaatcggatcgcgccaacctcgaatagaagctttcgaatccggattgggcctttcgagcctcgccattcgctctagtgttggactgcggggtttccttcatgttacagagatcgtgcatctcaagaagggcactcctctgcggaccaagagatttgagcgcgattggattatacacggcgatgcccaaaaccgtccgccgcaagacccactcgcacgctcggagtgcgagttcccctgttccaggatctcgatcgtacaatacgagagatgcagctcatatctgctctgcagtgtactcgtctgcttcagcattcacgaggagaaagtgtttgtgattggggtgaattcagtttgattgtattacctcgtggaattgatcaagtcgcggagttgaaaatctcagtccgtttgctccccgatcgagcgcgggaggtcgctatcataacttctaaatcatcgttgccgacatcagcgtcatcgtaataataataataaccaagaagcgccctctcgtgtacttatcatcgtcatcatcatcatcatgtccattatcgttctacactgagccgttcggtgtcggacgagcggtcgcattatcatagtgtcgcctctattgtacaactgcctcagtttcttgtttctaatgtttgcaactccgtaatttggtagattatgtcacaccctagatccggcgtcaatttcatacctttaactagctaaaacccggtggcgatgtaatgtcatccagccgggaaacctcacacgtttcaacgtctgggttcgaatcatcaacaagcttgcagacgattcctatggccgcgggcttacgaagacgggacgacgtcaggacgtaaatgctgcgccggctgcacaaacttgcgagttggctcgcccgctgtctcaaacagagcggacaaggcaattcgaatcgaaaccgttcccgataaccgacgagattatctgcggcattgcgaaagggggaaaaaatttacacggttctcgtcacgcggatggcgcgacaggccgagcgggggagggaattatgggtagatggggcataaggtttgggatttatttgggaacgcggcatcatatgcaagccactatgacagaaaaagagcaatcaatgacatcacatgttcaacgatcgtctgcaatgacgaattcgaacccgtcggtttccgatcattcacgctcacgcattcagttctctcttcttcaagttctttgatacaatacatagctatttgcaggattggttgaaaggctccaataatagtggaagccaaaattagaaaaggattttcgtccgatgttttagccgtcttccttcggaggcgtgaaccagcctgaggagggaagaacgaacagaattagaccactagttgatcagtcgtcgacggattctctgaaccagagatcagcaccccggccagccacgacacactcgaaggatccatcggtctacttcgccagatcatggcgaacattccggatcaaagattttctcagattacctcaaagccctacgagaatttcgtcacgcacaacaggctctcagcccgtcggaataggctccaacggtcgcggtcgtgcgtggcataactctcgccggtggcaaagtctgtcaactcgaacgacattctcaccattcttctcgtgtatttgaacgaggctcttaaagctctgttgggctcttgcaagcgagtactgtcctctattgcccccgaactggatgcgtgctttgcctttgaccagagtagcggcgatctgcacgatgatggcttcaaccggatacgcagaactccatccttgtttggttaacaactccatgcagatggctccgccgccgagaacgtaaccccccgatattgcgggtgttacgactcggatgaaaggcggttcgaatgggtagttgtcctgtgaatacattcaatcatttaatcttgactccgaacgttgacgtagagactatgaggaccggtttcggctctcctcgatgcgcgtgataaaaggtagaaactgctgacgccagaaggaaaaatcgagttaccctgaacaacatgtttaggagtatgtggtctttgccctccttatccttgagcacattcatgtcggagtgcaaaggagagtcggggtcgacccggaagagcttcacgttccattcgtacaaagaatcgttcacgagctctacctcgaagaccccgcttttgtacgagtcactgcgatagacctccttcagctccttcatgagccgatccgtggcctgcagggatcccgacacgttgccttctaggtagtccttccgttgattctgccgcagccgttctaacgtcacgacgtgctccaccgaaaggccgtcgactgcaagcaagtaacaccagttgggaggatgacgtgaggagcgaagcgaatgttcgggaacgccacaaaggggatcgagaccgctgggacaagtgggaaaagccaagaaagctcataccctcttccttgttgttttcggtggcgctctcctcttccatctcgatgtgcatatccatttcttcgagttcatcatcgtcgtcggaaggtgcatcggaaggcgccgaaggtggaggtgatagtaggatcgctgatgacgcctgctccattttttccagctcaagaggttcgctgaaactgtgtactttacacaactcccgcaccaggactcggacctgaaatcaagcagatgcattgagattaaggcaagggagggagagctcccagcggaattaaatgccatggcaccctcgattcggcaaatacaccactgtccgcgaaataaaccctagacacgagttcacgagaagaatacacgggagaacggacgataccatcctcaaattcgtgtcctggctgagtgaatcagcgtttcgaagctctgaaccaggtgttagcgcaccgaggcggtcagataggtgacctctctggtttttgatttcctttcacagaaataagccctcgatcacaccgcttcgaaagttatgaaagccagtaaatagtaaggcccgagtggttatccgcagcttccgagaagcgccacagcttcatgacggtactttccgagccgaagtgattcatggattcgttcaaatgaatgagggatccattccaggtgagtgtgaattcttccggatatccccgccgaagtgccgccgatccttcttaatgtcccttgatactcttttagggatgagactgactcaaatacgctcaggcagctacgggagaagccagttacccttctagagtggaacgaaattcgcagctgtccaactcgtaaacagagaacgccattccagaaataaccaaacagaatacaacccacagtgccacgcgtcaaccttcgcggtcatccgcgaatcagattacagcccctcagatcttcactgaagaaattcagaaacgttcgtcagaaagcttcaaattgcttccactgaaagaataacagggagctgtacgtcaggtgaccttgcccagggagctgctctcaaagacagctagaccgaccgaacagcgaaagcagcatggcggataatattttttggagcaatgggtgaattcttagcagaagttacccttgggaattcagccgctaggagaaattacggcagtactttatcggtcaatgtcgcatggggagtgatatgcgattggggaaagggagcgaggaatgatacgagccctcggcatcaaagtttgaggcgtatctgatactccatcggatcctacgggatcgatgttgtcactccaggaagttagaaagacaccatactcacctgtgcgagtatgtggttgtccggtcctgaggtattggttaacatttggacgatgttagttatagcaggatcttctgtatcactaaaccatactggcggtgtttgaggataggtctcctggaaaaaaaaaacatcaagttatcaatcaaccaggttccaaactttgcctgtcgaatcatcgtcgagactctgagctttggccacgcgtgggaagcagtgaatattcgagtttccgaaaaccctcgagctcgtagccacacgtttctatggcgtgagtcttgttcaggctcgtcgagcgctgtctccaaggttctcgctgagcgcggtgatcggaccaaaacgagctacaaggacgccgcggaagatccagactccgagcaagcttcggttccgattggatgatctcaagctggtatcaaattattcgtttctgtgtgcgcgctcccggaactctgtgtgtaagctgtcaagtacgttcgtgtgtgaccgatcatcggtggcaagtgacatcggcagctgaacggacgaccgaagaagtcgagcgacgtgtattctagaacaagttcgaatgagacaatatcctgagacggaggctgtctgaatacgtttcggacgaacacattgttcttcttcgaaccgtcatatctcagcgaaatgactctgtagcttgggaagttgtgcctcaggggaccgaacgagcgtgttgcttcgtcccgtatagaggggtcatcgaagtagccgtgactacttcgttgagttacagattcatggtacaatgtctcactcgcttcggtgccctggcggaactgacatctgccgctgatggcagctctgcatcctcccgcgttcgagttactcaactcgccgcgaaacgcagctttggtcggcaagtccgcgggcgggcgagcgataccacaaccaccccaacagtagaactgaaaacgattctgagcaagttggactgaggcacgtagaaccactggaacgtttccgatgagtttgtgtcacagcatcggtagattgggctcatgagtcacgcgtttcttctatggggaccgacgcgaggtccgcagcggtgtagaagtgtttgaacacaggattcgaagtcacggcctgcgagaagccagtgttgagctcgaaccgtagacgcgacgcaagaattgaatccagatagccaacatggctcagtgatgaggaggcatcgagagcatggacgaaccattcaaagggcgagttcgaggatgaatcgaatctggatcaagagtacatacatatcttcatgagaaatcctcatcaaatccctcgcccctccccctcaggttcctccagcaccgtaattgaagctacaaccagaagcccggtcgctcccatattcaactccgttgtcagttcaaggcttaattccgactccgtatccgctgagcattctgagcggaaaattgaaaggaacgcagtgtcgaaactctgagataacagttctcgctgcagtctgcaagtcttgggaactgctctgaccatgaaaccggttgtcgtcgagtggtaggattcaggatggcacctggttgacgaatcggaggccgaggaggatgcgtgcacccatggttgagaacttcgagtgtccttaggtgggtactgcattgctcggaagttatttcgcctcatctggaagtcgggcatcgagtctctcacggaagcctgctgcggaaatacggcgaggagctcaccaagcaagttccagttggctgcccaggctcccacttgtctgtcgagggcgccgttgctggactccacagctttgagcggcagggagctcggaagagcgatggtgatgcgagaacagaactgcagcgctctagcgatccagctgcctgatcagaggagctctccgtgagttccgccaaacaggatggattgagctagatggcgaccctgaagatttgacgcggtgtcgaggtgcattctctaatggaacctttcctcccatatcagcccttgtaggatcgggaggcagtgcattcacatcatatctctctcgggtcgagggcgttcaggcgagtaattccccctgtattcagtttattttccagcatcctgcaagggttccacatagaacagaggaaagctctgctatagtcgctttgatgagagcaggactcgatacgggggatcgctcgtctggaaatggggtctatacacggcgcacgttatgccctcgggagttccgaaacattggcaatgaccggcatagacagaggattagttcataatcgggtcgagaaaacgagacaatttcgagacagctcgacagattcgtgctgagttgttagaaatcaagaatctagtattcctctccgcaccgtgaaggtctcagagaggctggatcacataacccactattgcggggagtcaacaagaatgaacgactcgctcggcggagcagcactcaaagcgaacacctgccgactgaagtgaactcccgcttaccgatgagtccgagttcaggtgtgcaagccgagtcgacaccaattcgtcccctgcagaggcccttgtcgctctcgcatactgttggaattgacacagcgagttttttcacttcggatctacttcagatacggagctagaattaggcctagaaattctggccgttgagaacgttgcgcggaaattcgacggtcgcgcgacgcgctggagtttgaaacctcagcggttcatcgatcggaatgaaatcgtgcgatgaacagcgggcaattcatcactgggagacccgaaattagagattatcggtcgctgccaggctagcgttgagtcagcctcgcaactgtcttcctccaaatctcgtttgcggagcaagggagagaggacagaattcgtcaacacagttcctggaaacccatctatcattccatcggataatcatcggataagctgtgggttcgaccgaaattaacgatatttcttcacgagacgtaagttgcagtcgcgttccatgctggacacaaacgcgacccactcacaaagggcgcctggggccaggagatgagatttagctcacagcgaaggctaggtcgtttcaaggttggcggcgtcttataagacgtcaatgcccctcgtggagttccctttctcactcagttccccgtcccatccgaataacctacacgagtcagccacatgccatgttctgcggttaccaaactgctgagtaaccatgaattaacgtggggatatagcagaacctcgaaaaacgtgggagacggaccagtggcgtactcaggggggggttaagaggggccctgagtcggacccaaagatgttttcggaccgtcgtctccgaagcctcgacatctaggagggctgacattcctcgaatgaacccggcactccgttattttcccccaaagctgcagcagaaataaatctcctccggaagtgacaggagggagagcgacaataccaataatggatggtggagataccgtttcattctgaagcgtcggtgatcggtgcaccgtagacgttcagcttttcgtttgaaccaatataaatagagcgaaactaagactctatggtcgtgattgttgctttcgccgtctggacgctgctgatggcgatcaaatgttgttgcgtcaaatcgtcgcccgtgtgactgactgcctcaatggctggctgggcgactgaatcgttcggctgcagaccgcggaagtggcgctgaacaagatattgcagccgggtgcgttacctcacgagtgggctacgagaactgaccgactggaacagcctgttcccccgctctctcgccgaagaataagatcagcttcagtctttgtaggtattcgttgttgagtgggcgccactcaatttcgcaaaagtcgcccttgtgcgcaccctcgctgttgtccccaatcacagttcgctcgctggctgactgctcgcttcgtcagtagacggcagaacagaccctcacacgggcgcacaagaactgcctacgacactgctgctccggtggtcgacagcggtgaacactgtctgaatttcggatgcgacagaaacccgcgcggatcgggaacgaccacgagaaaggaatcggacaccttacagcattcgtatccgagagagctgaatgccgagggagttctcgttggtcagtgaacgacagaaatcgacgacggctccacgctcgaaggtgacttcgacaattctcgaatgtccagaatacaatgtgcggagaataacagctttctgccccgcgcagactttcttctccgtccgcgaagttctcgtttgtaagagggataaaatgggaaatagaaagaagaaaaagctccaaccggcgaaggtcaccacacgttttttctattgtccgcttccattgcggagcctgggaagggtttcgttcggcagtcgccgttgctcgctcactggatggatagttggccatattgcttgcccgctcgctcgtctgctaccagcaccgcacgccagccccggcgccggcggcgattcgaaacgctcctacgtcacttccgtgtgaagaaaggggtgactgctaagttgagttgcgcagaacgtttcggaactgttggcagccaactcagctaggaagaaagacttggacggtaacacttgaattcggtgacaactcaccgacatttcaagggctggggcgacgaaaaatgtgagtttcgacgaacacaactcttgatgaagctggttgctgccgaacagaatacgaagctctatttcagaaatcgaaatatcccatgtcaaggaagtaatagaccgatgtgcaatgactcccgctgagacctgcatctagacatcgagcgtccatgcctcctgcatggaaaactccgtgagcacacgtgaagtggttctgccgattcacacccgggaaatcatttagagcaacagcgccttatagaaaaatcaagatctgccgattcatctcggaggacgctccctcaacgctacggggatctatcatctgctatcctagcgagggaatactgccaaaagaaagcgcgttcccagaacttggcatggagagaactaatgacaccctcaggtcgaagctcagcagtattttcaatcgttccgactatccgcgatgcgaagttccctctgcagcactcgcacagacacaaaagccccaaaactcaccagccaggaagcggacgaggtcaatgctatcccacatactgagccaccgcagaaccaaaacaaacgccacgaagccaggtttaatgcgtctaatggcttccatgagatcccgattcttgtcttaattccgttttcgactcggatattcctgctccgacaaagaatttcatcatcgcgagtcctcacattagttcggacacctcgcttcactgattcgtttgcatcgacccgtctctatgttatttcttcttcgcttttattctgagcgaatcaaatggttaagctccatcattgacaacacatggggagcccgcgagcgtttgacgttcaagttctcgctcctcggtgattcggaacaaaaacagcaaaggatgtcgaatcaaaagatgccgttcctgtgcaacagtagtttgcaaggcccctgattattacgagacgttaaattatccagagtcgagacacgagaacgagtacgccgccagttgcgcttctcgaattatctgaggagcggtccgatggtaacgatcggagattttttccaatatcacgctcggattacggactcggattccagaatacgttcctcgatccgtggctgctcgcctcatcgcacgggaggagacccggagacaggtttcggaggaggtggtgcgagcccagaagcgagaataattaggccgagtaggaatctcatcgctgggttgtcaggttcggtcgtcaggggaaaaacatgctccatcgatacaaagtccgaagttcatcaagccagctggtccgcagaaaagcaacatggttcagaagaggagacgaaagtatggatcgaagcccaaagaaatagcacgtttcgctctttcacgacggaatcggtgtgacggcaatgagaggaaaagaagaacatttcatgattctaacagcctcgaacgcattccgtttcgaacagtttctctcaaaagggagaaatccgagctctcgaggctcctggaataccttgagcaaacaacattgattgggatgatggaattatctatcacgggatatagaaagatatcgcttttcgccattcacaagtagccgaaaagagtggatctcatcggagccaaagtacgacaaggtccgaaagttgtgagattagcgaagatagcgatgatttgtcggagagacagaaaatgtgctccgacaccagttcggttagggtcaggaaagacaaacggcgagaaccgaccgaaggttcggggtccccgaaaagccgtcgttttccataaaccagatgtttgacatcatatctcgcacatataagagattccgtcattatgcggaaattgatcacacctttctcagtttcggttccagggcataagatcagggttctctcgattccctccctcggttttgagacgaatcaagatagtaacttgatacccgttgaaattcgcaaaacacctgttgacgatgacatccacgccaggaagaaccatcatgccaccgaaacattatgtcgatcaaattcaatggagacgttcaggaagctcgtgactgttggtagcgccgactacaacagtaacaaaaacaacaggggaaacaaagcagcaggcaatgaaacctgcaggataagtagctttgatacagccgtcgccgctgcggaatattcttacgctccaaaatagtattgtgcgttgcacaacctaagactcgtcaccatctcccttcggccgattgttgcccgcgtcgcctgggaaatgcagtcagtttttgtggaaagctcctaaaacctgagagctcaagagcgtcgcaaatcgatgagcagcagacgacacggaaatttcgcacgcgattttgatcagccacacaaagctgacgcttcggaaggctcgtaagctgccgatgcctccgccatcatggttgaacggctgttcaacggcatcgctttaaatgaaatggaaaactgcgggtatcagagatccaccaattatcggatgatcgagtcgttgattttcgtcgaagcattgcgtcactgaggcctttacagcggtgacggtgcgtaaaagggcttcgcatggatccgccaggcataacgaaaatcgtatcgtgtcgtgctcttatttgtcgtccacttcttctcgacgatacgcttgcttgttgcaataagatagattcctccgcaaagatttctcggggcctcctccacatagccttgttcgtcaactccgcgggcggcgcccaccactgcctcggcgaccgacctgagcagaagttccgcaaacgagacttcgcagtccgagcgtagtcttcggagtggttgactgactgactgctcggtacttgcggccgacaccagcatcgccgtcgtctcaacagcagccgtcattattccggttcgctacaggatcattcgacgtggccgccagagtacatccaagcagaccctgaccatcgatcagttgacaggagcgcgggtctcccaacgtgagaggctacgagggggcctactattcactgacgataggagccgaggttccgcgtactagtcgaggattccgggattggaactcggggctgatcagcttacacggttccacaatactgaaagcacgacttcatccctccccccatcggccacagccttgatcggtcatcgtcaggaatacagccagccaccgaacacaacaacgacgacgacgacaacaacaataacagctgatgctccggctgctggagatgccgatgcggcggcggcggaggagccacgaacgaagctggggctcgcttatggaggggcctcttcgtcgctgccgagacgacctaagactgagacagacacccctgaatatcgctgttggtgctgctgtcgctctgtggtattttcagaaaatcctgcttctctccagtctgaccgctcggccgccaggatcgaaatcctcccagggaatcgatccacagtttgctgccgattccaacggggcgcagtctccaacggaatttcgagctgcatgagttgcgaacgtttcgtctttgctgttcgaatctaagccgatcacgttcctccactatggaacgaggcagcctgtgaagcaattttcagatgaagtggaaaaaactcggtttttgttctctctttcggaaagtcagcgatgcaaatcgccgcagtcgaagccacctatcgcaagtgtccgctctttcggtctgcagcactgcgttcagtcttccgaccggctcaaaatctccgtctcgaaccacggaaagaagttgggaagtttcgatccgcgtttagttcgttcaggcattcatccaggttttccgcctcggtagcagtggacacggcttgcagtgcgagtctctacttttcagttccgagttccttggtttcactgcgcgctgagtcattatggtggttggcgaaacatagaactccgatgccaaattggctgccatcaccgccgggccaatgcccccgagaaaagcgaatgcgtttgcatgccaagagcagtacgagtcaagcgcatgagcacaagtgatcacgaccagctcccgcgaatcggagggagaatctgcaagcacactctaaaacctaagcccgctcgcgacgcgcagggagcgaaaatgaatcccaactatcacgcaaaaacctctgacgaccgacgagctagccggagccctctcaagctctcgctccagctcaccgaacgatttacgtaataaactgagatatcggttgacaagcgataagcaaactttgccacagatttctcgccttccgaccatgatcaatcaaatctagcttcattcatcaaatcatccattgatctagtcgacaacactgtggaccatgaagactgaataaactcgattctcaacaacatcatttagccatgcagtttgatcaatcgatgggtcatgttgcatatcatggtcaagaagacacttcttgagaccctagacgtgcgagcagaaatcatagttgacactcggaaacccttcgagcaaacgtgatgattcaccgaattcgaacgcactatattctggcgccaccctcgggccacaagtttatcattgcgtcgctcggcgagcactgcgtctgatgcacatcgagttcaatccgcatcctatcatgtgggatcccctcatcgccctccctcaacgttggtgcagcgtgtgtcaggtgcggttggaggtcagaaccgcgccaccaagcaagaaccgcggacctgcgtttggactttctcatacgtctcatctggaactgagatcggtcgaacgaatcgtttagctgcttcaaaaatcgcggtcgtggtcgacgatctcagtgacaaatatggttacggttgcaatagaactgacgacggaagcaagcacgccgaacgcggctattgcatggaaaaacctgggagagcgttactttccaaccaattccacaacttgtcaaaaaacggaagtcgtgaacatgaagaaaacttcggatgatgccatctccgttcgtgtcgtccgaacgcgcagcgcagttcgataacggaagcgagcaccaaaacgaagtaacaatggtggcgcgtaagcagcgatatttcagctccgatgctcgaagttaaccgaataccaagttcacgggagacagcatgaaaacactgagtccaccgaacacttcggcgactgaagcgaacccccgtgatcgaagcaagcttcacccgcagacggtactgcgccaagatatagagagtttcagtccaaacgcagcattgaaaagcccgtaggacgttcactgtatgcaagctcgttacagtatatctcagcggtcgaattcagatggcatcgttcgcctcacagctcagacaacttcgaacgaatcaacacgaggacacagccaaacatttctcctctatctgcgtagctacgttagccatacaggcgcattcgaaggatttctcccggcgaaaactagagattcgccagtttttgaagccgtagaaacaacggtggccacgacagccgcagagcattcattctcatgctaacgcgtagaggaagtggcgacactccactacgacaggcaggcaagcagcgagctaggcagcctcgacgatagccaccagcagcaacaacgcactgagcatctcttccgtattgaacagttcccagccgagttgattcatcgtggacacttcggaaactcatcccgcgttgctttcgggatgggaagacgccatgatgagcggaaaatgtctttcagctgagccctaattcgatagggagctcagtccagagccgagtatcagtcgtaaggtgtcaccaactaatccgtggtcgggtatgctcacacgttcaagatgctgccagcccgagctgatagggagttcgttttcggagcaagaacaatctctcggttcacttgggacgagcagagggcgaagaaagtccgcatcggaatcgattcgacgatgagccaccatcgagcccctccttggaatcaatcgaagaccacagctcagacgtcgcagagctcggtagaactctgaggagccatactcaccgtaatgtttgcgtgaatctcgtatcgcttcgagttgcgtcctatgaatcgacagatgagttcgtcgacggatgctgtaaccacctggaaaatttcgtggtttttgggaaaggacgcttgcagcgtctgaatgtcttgttttagctggagaaggcaagccatcacgagcactgcattcccgagcgaggccacaacaccaccgctcagtctttggatcacgaacgaaaatttcacgaagagatttcggttgcaccaaactagctctgcagcagagcgcacagtaatcgttcttgctcggagacacggtcagactttacaacaagatggcgtgcccgtaccactttagcgggctatagtccgccgtcgagagggggtcgtctcgcagcggcatagaaactatgaagccagcgaaaccgcacgctgcaaatcgtggtgtttatgcgcgaattccgtgaatgaaccaactctgaacccttctacgattgcgagaggacacgtttctgcgagtcgttcgactgaacggtcctcgtggagggacaagtcgccgctgctcttgttgaggctgcaagcagaagtttcaatttcggagttagagctgaagttggagacagcgttgcgactgttcgggcgcttctccagtattgatttttttttcattcgtcgagaatcgtgggcggggacagtatccaactccataagatgatggttcgattgtttactcctattgttgcttccgcgaggcgaaagcgcaaaatgctacagggaggcagtgcctctgcgtcggcgcggttcgcctggaacgcctctagctctcgaaatcgcggaatgattcaggctcagttcacgaaacatatttttgacgagatctacgaatggaatcgtatgtcctcgcagttctccaacttgatccgtttcttgatcgtcgttggagcttcatgagggtgatccatgaggatcctcggacaagtctctcagtcagtcgaatcggaccgtcacggacagtggctccacttgcattcgcgtcatgcgatgtacgtagtcatcgcagtcgatattcaatccgactggcgagttcagtgctctgtctatccatcaattgatatgtaatcatataatgtaggcgtgatttcagcaacagcggccgctacggcggcaggagcgcattgccctttcgtctcgaaggccgaataatgtccagaaaatccagatgaggacgtgtagcaccaacttgcggccaatcaccgtgcgcagcccatattccgcttacgcacctattgagcccagccaattcctcaccaaacttttttctgaatgatgaggacgctttggacgtcactggtttcggaaccaacgctcaagttcgttccgtgaaggcttccggaaacgcctgtgaatgacggaggacgagagaaccttcagattcccgtgcgcgacgcgcaggtggcaccgacatctgacgctgcgcgcggtctccgcggcttccacgaaatccgtcgaggatctcgggatcgcaatagcttatttgttcaacgagagcagtcactgatcgaaaaatagtgaggaaaaaagttaaatgtttcgcccccgccaaggagttgctatccaattgcaggtcttcggagccgaaggcatccttgtactgggagaaccacctgacgccacaacaagttcaaactttctcttttggttgtggtacatttgtggttcgtcggggcaggagtgaacaaccatcgaaggaggagccagtttttagttcttgtgggaaatcttggcgtcggcatcgtttccgccagtcccggaaccgatcgtggctccatctgtggctcggtactgttagctacgggcgtccggaacagatacatgccagtgatgcagttacgcttgccctggaaaccttagtcaatgctactgggtcatgtggggagatttgggacgcgacacagttgcctaattctcccgggggccgagaggggttcctgtggagagggccaccaaaaggtcgcgcttgtcaacataagtttctaatgaacctgactcgttctgggacacgatcattgaactcgtcgtcaagtaccatatatgagctgttgtttggatggtgtcaggcgaactatggaaacgggcatgtcgtctgggcgagcccccgcgtttcatcgcgaattctcttattcatttccataaagctgcggcggataggagaaacgtttattctacaaagagaccgccagatgcgaaagaacagaatctccaataggatcgtagaactcaggaatagctgggacaggtgacggaactcatgtagcactccgctgagcagacaggtcattcctctgtgcgttctctcaatgtgcgcgcaaccagctcaacgatcccttcctttccaatgcgaagaagaattggaatcgttcggacacactgtggtcagggtgcgattccgatggcggaggaagacgaaaatcgtgatttagagtaactgcggctggaatgtgtatcacaaggagataagacgactgaaggaggtcggagaaccgatcatggccgatatggggcgagagcagatgcctcgcaatgtcacgatatccatcggcgactcatctattttcctccctccgcagctccagttgtgaagagctattttctgtgagatagcatcgggattgcgtgactcccgtccctgaacaccatgccttcaatctcgccaagtttcgatctgaatgtgacaacgcaagcagagcataacttcgcttgcagtcccagttacccacgcgtccaacaccagtggcgacagcgatgaaacagaaataacgacttcgccacgttttagacgtgagagctagctgggcgtttcgccagatcctcatccttcataggaatatttattcgatccgaggtcgctctgtcttcatgggcgactccttcgtcgtaaactctcgggccagattggacccgagctccctccgtgcaccagggcagcacacgacacagcgattcaaagttttccgtgatgattgttctcgggcgagccttttgatactcatctgattcaatagcggctttttcggcacgtcgatggcgctcgagtgctacgctagagcgctgaatacagtaatatgctcatgggatatgagttcgagatacggacgagcatgcatccgatagtcagggaagagaacacatatgatgcacaagctgattctctgttcgagtgatgggaaatgggggcggattattcgatcgaagcccaccacaacaccgtcagcggctctcggttgggagctctgagagattctgtatgattcagggtctgcgtacaattctggtttccactgccagcagtagagccatgcaatccaaggagaatgaccttagctcctgaaaatgcctgatccgatttagagtttcccccgatattttgagttctcccacatcgcttcagacatctcgaaaattttacccacctcatcggccgacgacaatctgccacgagctgaatgagccagtatgaagatcgaacgatgattacaataggattcgatatcgctgactccgtcgctctccaagaagagcgcctcctccattttcttcatgaagtcgacgggaacggaacgctcgcagtcgcagcgcagctcattgtcgtcgtctcctttcatatcgcaccatattccgcctcctcgtgatttcccccgttgagctgctcttacgagatatggtcttccagaatgccggaacgagcttctaagcgtaaaacgaacagttccctggaatattccacagcagattggagctccttgttcgataaaatatgcgaatgaaaggtcatccaaggacattgttccgtgcgaaatgtaccaacattgcttgacccagagattccgagctatgcgcggaaattcacaaactccgcaggaaggttgaacaatgagaggtttctcagtatggatgttcggttgatgttggtgagatcgtacattccgaccaacttcgcaactctggaaacttattcgggggtaactcatttttgtcaggatcgtaaatgtccgcttgacctttttttggttccgaagacgattcaattcgggcttagttggatttaagagctgaacagatttggtttatttttttctgcttcctagaagcgttgccatgagcgatggaagttgagcgcgtcgagctctcgcaaacaccgtgtattcctcacagaatgcaagcgacatctgcttataacctaaatatcgctcgaaacagaatttctcaacgattactactaacttggatcgccggcgagttccaatccacggacctccgagaaattcagctctcttactcgatcatttgaccctgtcgtcatgggaggctggagaataactagtgtgggacgccttactttgagacaggtttgtaccgtagtacaggttttgtgcggtcgaaagccgggaggagtcgccaatatggcagaaaagaacaagtccacggggcacaaagagtaggagagtcgttcatcgctcagcccgcggtcgtcaacacatgggagccatggatcgctcgaacgaggtttttcccaaagagccggaggagcgaatcgaggtgggtactggaagtaggaggccaacggctttcttgacacagagggctccagaggagaagcggctgtcaacgcttctctgcctgagggtcccggctaagttgtgattggctaatcatattcctatggatatatgttcattagccacgaacggacttcaatgaacagttcccacgcatcacgaagggttgacagactgcctttcaacgaacgctacatcacgattcccggtggggacgttgcccttgcaagttcattcattgaagtccccattccggtggatcatgacgcagaacttgcctcggaaatcggacgctcagtcgagggaaatgccggccgacgacaggaacgtcggtttccaataaatctcctcctgggagatctggaacggaactgatcgcagtcgccccctggcgaccaaactcaatcgaaagagagttcacgcatcgatcaagatgcaggtgtctgtattggagacctacaatcgacgcaatgagtcacgttgagcacttacctcatcgagcgaggggagatgcagttgcatatgcggagggatctcgcggcgggactttgaacatttggataaagccgccaataacgactctggtccacccagttcgaatgaaaccagattatggagtaccgatattcgcgtgcagcctgataacgaccatgacttggaatcgtgattccaggcagcgcggcttcaatgcactcttagactcgatttgcaaaggagcaccgctcttccgttctgtcaccaagagcgggagagtcttcggagcactgactttgagagggtaggcttctgactctttccgagaccatgttcaacgaggggttaatggacatgcgctcgttctcagctaatgctgctcagatcgaaagatgtggacccgaatccggctcaccaaagtttcatccattcgcgtggctttcttgaaaccgtgaccgcactcatagatgtcggtcaatggacaatttcggaatgtccgatatcgtatccgacgaacaactttctctccatccctcattggtggggcctcaattcccaacgataaatagtgtttatcgggggtgggaatggcgtggatccgactcgaccgccgatcggcctagcatatccttgtagcactcgacgccagtcttcgacgaacgaggagcttcatcgttggtgaacttgctctcaaatttcatcagctcatccaggggactttccccgaagtgggcagctcgcaatgttaccaagtaagcatgctgctgttcgaggaactcaccgagctcatgccctcgaatacttcttaaccaacatcgcactacagagaactcgcctgattcgctccaagccataaggagggagaagtttcaagtgtgcataaatggatcattctattggggaactgcaattctaacgacaatgtctgaacttactttcccgacactgaagatccttgaaagagaaggctcaagatgagaaacccgttcaatgacaaattatgtgttccgttctgcgacgagaacctcgaatgtgtccgggattgacggtaatgtaccctggtaatgaaacctccctgagtggctttcaaagtgcgcgccacgttttcaaagacagagcctcgaacgctgcctgaagttttgagctattggccgtggctattcttgcaataatcttcccgatccgtgacgaagtgaccgtttcagagagcctcgatccatggggggagttggtcaagctctggcctctggaatcgaccaaacacagtagtccattgggttgaagtcagaagagtaggcagaccatttatgaaacgtgatggaatcgggaaaatgtgcctcccaccaatcccgcgtggattccgctcactgagcaggagctccgccacaggagcacggctgccttcaaggtatctcggcggtgaacaccagcatcaattttcacaccctgccctccatgcacaagggccgactccccaggagcgccaatgccggctcagaccatgtcagagtggtgacaaacccttctaagacggaacccgcaactgatgcggggggtatagtccgtgagatagatcgagttctgttcaaaaatatgttttctgaatccttggattgacaccgaagggtcgtcctcctgaaatcaaccgccggagctcttggaaagttcttttcggcaacatgatttttttttttgtttcggaagcattcaagatagatggagaactcccgtaatggaattgttcaccgccccaaaagattgctcgtccagaaagattgcttccgtgctctcttttcctcttctccaatcctcactggcgaactcttccctagtcggccgccgacgctggcacgtggatatcgctcgaaagctccctcgagagtttcactctttcgagttctgtgccagtttcacgacttaattaacttaacccttagcctcacggtatcatcagaaagccctttaacgcacgttttatctcgagaccatctcgctgagttgttccgaaacgcaaccatccgagaccatctccgaatctccccgaagtattattggcttcgcagagaatgaggggagatgaagtatgggatattttttataaaatcgatgccgcgagcgaccgaagaacgacccccgaaacttggaataatatttttcttccgtgtcctcaagtttcgaacggacgactgcaggaccattcatgtacattcatccctgtcgaagtttgttcaaagtttccttcccccagaagttcggggcgctctcaatccatatcggtggcctccacaacacgatgcaagagggttcatcgcgatcggactcttggggctggagtctgtcgcgaacacacagagagacaggcattcgactttaatttcgcacgcgtcggcctttggcgcaaaacggcttcaggctgaagtggagagatgatgacagcccattcgttctcacctctgctatcggaattccaggatctccatctccaggaaacagaaaactggaccaacctgctcatccctgtatgcaaccaaggcatacgatgggatcgaccgagagaggaatcaagaagtggcaatggccttcaccgtggaccttcaagccctgcgttgcttcgccctttccgttcgcgtgcccaactaagaagaagaagggatcgagtccctataggacaacaacctcagagttgaagcaggctttcccattatcgagcgtccttctagcgatctgcatagccgaccttttctgtgtcaattacagttttatttgcgtgacaacacgaatagcggacccagagaacagacagatgacaggagccagtctcctacttcaaactaaaggggggcaatgaaactcgaaggaaggcaattattcgaagcggtcatgacttcttccgctgacgacatcgaatcgatggcgacgagcgaaagagagatgcgagctcttcccggggaaacaggtaccctcggcgacgagaaatacattccttttaacccaacggaaagtgtatttctttattggcaactcaaaaaagtaagactctatggttcacgaaaagaactgtcagtgcgtaaaaaaggagaatgagagaagataggagagccatagggaaaaaatgcatttgcgtacgacccagaagaatggaaaattcaactgaagtgtggtcactggttgtttaggctacgagtaggggaacgaaccgcgaaggttttctgagacaaggcaacccagtgctgtttgcgatcgaatacaagtactggatactcgcctctcggattcagaaaaatcagcccgggagcaggagttcattcgggagaggcaaaccgcttgctcattgaattgaatgcacgctacttccatggggcttcaatggattttaagtctccacagcgcaatgggaaccgaccgcgagtccgtggagttggaagggaagctcatcgaagcgctagcaaaaaaataggccactgggcgaaagtttcttaggtatccttgagaccagagtcgcgaagaattcatcactggacaactcagccgattctcgttcgcggcggcggaagcacagagtggagtcagacacatgaaaataatcggtgtcatagacctcggaaggtagccaggaggctttctgatcatgatgtcggttgtgggtggaaaaggggggaaccgagcgtcttcgattcacatctaagaaagaggatcagagtaacaaacgcaatcaactagaatgaagatatcccactgaaacccactgcaggattctaccggcaaggggaagcgtgtctcgatctatgtcctcttgcacatcttctcgacaccatagggaaggtttcgttccggtcagagaatggaatgcgagactgcgggccattttctcaggtgttcgagcttgaggttgaatctggacgagagccagcacaacatagcacccatagctgcggcaacacgactcggacaatccagtcccactcataaggtggggggtgatttaaggttgttgtggcccatgtccgtctcggtgacttgcagtgaaccatgtaagggttcattgcggttcatcggcctcggggtgtatgggaacaccatgaaacacaggcagacacacgttcgataggcccaatcaaccggaaacgagattctcgagagccagatccccgagactcagtgttcggaaatcctgttgcccggagactcctcttgctcgttttggggagcgctggacgctgactccgccggagtgaaattctgaattgcctcgctgtcatgaccactccgaaatgtaacgtacttgcagtgtttccacgctgtgatttccagccaggaggagaccccaaggagctcaagtccgccatcagctcaaagaggcaattgagaatactggatccaccggaacatttgaccgagaacttttctctacgtgatcctttctccacgaaggaggctctccgaatagaactatcatgagaatgagagaaaagaatgcgagatatggcccaggatttatgtagactcagagggtttgagggaatgtgaaactgattgtcagcggcaaaccgaggctgcccacttcgaaggagcggagcatcgtcaaggccagtcgcgggcggaagtcacgaaagaaacgggctgtcgagatgaccgtatcctgctgctacaccaccctccttgcagtgttgatcctttgttctaaaaatccaaccgcagtcgtccacattgaaatatatctcctgcgtcgaggcaaagatgcacctggagagtgaaagtcgagcgtgacatactgcggatgggataccgttaattgacgaatgaaggtacccaagaatcggaaaactcggtggaaaacgtcggtagagcagccgagtcaaaaagctctagaggaaacttacccaaagatgccgagctcgttcacgacgtctgtgaagtgaagtttgtttctattcacgagataatttttcgaggacaatgtatctatcaattccatgatgatatattctttgcgctcagcttcggttaatgttttcaagaatcctggaatatcggttccatatatgttgttgcctgcaaaacaacgagtgcacgctgcagaaaacagcgacgtcacaccgtctgggctccgaaagcaccatatctcatccgaacttggtagttttgcccattcattctctcgtttttgcgagcgtctcgattagctcgcgagggcaaactaaacctacctcctccttcacgctgaggcttcaatacatatttttccggagagctcaacaccatgtcgtggacctgctcttcctcaagagcgaaaagtccaacgaaaactttccgaagccgttcggcttgggcagcgtcgtcgcagaacttttctagaactccaggtcgcgccaactcctgctggatcttcttgcaccctgtggagcaatcgatactcacgatggaattctgattcgatcatctgtcggaaccagcaaccgaacctcaagggagtgatcgaattgctctatccctattttccgtaatgggttagtcgagcgaagtgcccgtcgatgtggtgccgaagttggtgatatcgctttcgaatgtttcaaacggcggagaccaaaggaccgtgtccgatagacttcgtgaggcttgttgtgaaggcttttttcggaggtctgggacccagcggacccgaaaaggttccgccctagtggttttcgagtaactgatccattcagggcctcgtttggaaagagagtcagcctcggtatggttgtcgaacggccgaccaagctactgtgataagaataccccgcatggatttcgtaatgatgcctttgatgcgttgtcctgctccccctgaagcgcgatttctgagagattcctcggattatcagagtgccgatacaacatggggcaacatcgcatttagtttttcgtaggagccagggccttcaagtgagcgttgtaacgcagagtcaaagaaactcggcgaactcaccaactaagtgccaggccacgtttggacatttgatgcaacgggaagactcaatgatctctcgagctgtccagagctcctccgtcggcgtttgacagggagcataccacgtcctcatgtagaacaccgcgatctcctggtcgtttatgaagagagcgccatcgtctgtctggcgtgcgctcatgaaatctgcattcgttctccacacaatctgatgagctgggacgttgaatttctcaacaaggagaagttcgagctgccgttggtcgtaggcgttgtagacgacgtcctcgaccgcgaaacatatgaccgcatcggggcttctgtgctgcgaaatgtaatgagcccaggcttccatcaagacacgcgcgatgttgctcccgttgttctcaggtgggaaacccgtttttttaagtttctgagcaacgaatctgtgcagttctcgagtaagcggggacagccctccgaaagccgcggacaccgtgttcacttctatctggaatcagataatcattcaaaccccacggagatccatcgcctcatgtaaggttgatcgggatccgttgatccatttcactgaacaacggttctacctgcttcgcgagtccatcctggcccaccatgtaatcggaacgaaggatagccaatgagggcacgttcttctggctctctcgagtgcgttcgtatagctcccatagcttccgagtccatgcgtcgacctcgatcgtatgctcgagactttctcttagaaattcgaagtcattcgttgctcgatggtatatggtgtttatgtcacactgcagttgattcacggagtcgaactgcgttttcggaaacggagaaggaaagagagcgaatggaacgaaggtcacagcatgggaaaacgggacaccttcccgggccttcatcaccatgcctctggagaaagcgaagcttttcgcgtcttctgcgacctcttccagcaatttatcttcgatgggcagagagactaaagtttccagatccatgatcttgaggctctgcatcgttgcctgcaaatcagtaccctcgtgtcaacagtgatgtggtctcatccggccatggcatgtagttcagaggtaacgccacagctctggagaatctgcgagcgcccaccaaaaaacctaaagcggttatctgtggaagctcggggagggacgggtgtaggggggtcatggtttgatgtcaagttttcgtctgctccggaggacagttaggattcgctccccgaatgatgagagtgaggaagctgcgtaacgtaatactaggacatacccgatcgcccgccgacaacaaaaatttcttatgtggtaaaaagaggatttaatttatatcagaatcaaatctgaaccatcttgagacccaagcccaccgcccgcaatgggattcgcgaggcgatagggagtgttactgaagcaataccgaaaggtgatcccgggacacttctgagagctggctgagaggttcagccggaaaacaaaggacatacccgatggttcgtgctgaacttcgcttcttttgttttccagccggtcgtcagctcaagcgttcaggaaaccctcgattcggcggaatcttggtacaggctgtgctcgtcgcagttcggttcgctgcttattgccctaccaacatcgatatggaatattagaggttaagtctctcctttcgtcgtacttcattgcagcatccaatccgcgcaccaatttcatgaccatgaaatggcgctctccaggcggggcccctcggtctcgtcgcttcagcccgataggctgtcctctgagaaggaatcgaaaattttctccgagtctggcgccaccgtggattcaccttgagtcgatcgaatcgggttcagcatgttcgcgattacaacagggaagactcctcttgggtaaacacttttgctcactcgttgtgcgtactgacgtcataacgctcttgtttacgataacaacggagcgcgtcaagctggccacggcatcacctcccgagcagaggtcgccttgcacgtatcgctttggaggcacatcggccagttcgcaatgattctcgttaaattgtatttgtcggaaatgaggagcgcaatgggaatgggaacacatggaagaacttcggctctgagtgcgtcgccgagtacgatacaaccttctgagtccacatccatgttgtggccgaccgtcgaggtatcaagaggttatgcctcagatgccagaaactcagatgccagaatctcagatgccagaaactcagatgccagaaactcagatgccagaatgaaaccctctcccgat
